United States Patent Application Publication US 2022/0211063 A1 - sequence listing, part 54

SEQ ID NO: 154 - DNA, 2508984 bp, Penicillium roqueforti (residues 1,254,493-2,508,984 of 2,508,984)
  misc_feature (1216)..(6722): n is a, c, g, or t
  misc_feature (98486)..(98857): n is a, c, g, or t
  misc_feature (139994)..(140089): n is a, c, g, or t
  misc_feature (294350)..(294525): n is a, c, g, or t
  misc_feature (357379)..(357564): n is a, c, g, or t
  misc_feature (460976)..(461052): n is a, c, g, or t
  misc_feature (472568)..(472749): n is a, c, g, or t
  misc_feature (615733)..(616014): n is a, c, g, or t
  misc_feature (740403)..(740511): n is a, c, g, or t
  misc_feature (916304)..(916440): n is a, c, g, or t
  misc_feature (1075456)..(1075601): n is a, c, g, or t
  misc_feature (1089928)..(1208428): n is a, c, g, or t
  misc_feature (1220018)..(1220059): n is a, c, g, or t
  misc_feature (1222419)..(1222592): n is a, c, g, or t
  misc_feature (1322112)..(1322182): n is a, c, g, or t
  misc_feature (1378264)..(1378636): n is a, c, g, or t
  misc_feature (1383307)..(1383666): n is a, c, g, or t
  misc_feature (1417348)..(1417608): n is a, c, g, or t
  misc_feature (1457330)..(1457524): n is a, c, g, or t
  misc_feature (1553516)..(1553586): n is a, c, g, or t
  misc_feature (1556418)..(1556522): n is a, c, g, or t
  misc_feature (1568119)..(1568214): n is a, c, g, or t
  misc_feature (1711248)..(1716990): n is a, c, g, or t
  misc_feature (1761953)..(1762094): n is a, c, g, or t
  misc_feature (1945830)..(1945927): n is a, c, g, or t
  misc_feature (1956430)..(1956552): n is a, c, g, or t
  misc_feature (2133157)..(2133260): n is a, c, g, or t
  misc_feature (2256500)..(2256658): n is a, c, g, or t
  misc_feature (2267826)..(2267857): n is a, c, g, or t
  misc_feature (2288169)..(2288337): n is a, c, g, or t
  misc_feature (2341570)..(2341588): n is a, c, g, or t
  misc_feature (2431195)..(2431540): n is a, c, g, or t
  misc_feature (2438904)..(2439354): n is a, c, g, or t
  misc_feature (2445186)..(2445330): n is a, c, g, or t
  misc_feature (2482622)..(2482830): n is a, c, g, or t
  misc_feature (2508978)..(2508979): n is a, c, g, or t
  misc_feature (2508981)..(2508982): n is a, c, g, or t
tgcgatttcaatcgcggtggtgcaccatctttccactccggctcggcgagtccaggccgtcgccgagatcatgcgaactgtgaaacatggttcagagatgcaggagggcgggaaagtcctgatctacgcctgggccctcgagcaaaagaacagccgtagaggttgggacaagggcgacgagcaagatcgaatggttccctgggttcgtaaaggtgatcaaccccagactttccatcgctactaccacctgtacgcggaaggcgagctggagcgcgacatcggcaatgctggcggtcgtgtgctagaatctgggtacgagaaagataactggtgggcgatcgcaacccccaaaacggctcatgacgtatgaaaatgtgatatgcgttccgagagccagcctcggagtcatggcacatcaattcgcacttgctggccccgccaaaatttctgcaaacaaaggaaaagaacgcaacaaacaccgaggggtagaaatcatctatacgattcactatccccacaaatcacgatatacctccaaccggcgctatgcaattcgtaacagaaaaatcacaaaagaaaagaaaaaaaaggcaggggaaactcaaggaaagacgtatagggcgtcatcgtcgtcgtcatttcatcctaaggcatggtccgggggggcatgccaaggtgatggcccatgaaatttggtgggggaatccccatctctggtggtcgtccaattccatagaactctctcgggggcggtggagccggtgcgtatgcagggacgcctgcagtgagctcttccagggagggaagttgaggtggaagtcctggcagatggcctgggattgcgcgtgaggaagatccctttctcggccgggatagagaggtgctggcacggcgggttctagtggttgggggatcgatggcagcactggagagagagaatggcaccacgcctgcgcgtcgagccatctcctgctctcccagctgccagtgcatggcctctgctgcacgccatgggatagccatttcctccgctaccttggaccacatttcggctttgaacctgccagacgagtgtgagattagtgaatttggtttcttgtcatccctatcccaaacctacctctcgtataaacgggctagtttgttcttcttatcttcatcccattcactgcggcgttccaagtagttctgataatggagacggcaactgatggcactgcggccggggagtcgtttgctgatatcctcccacttcatgccactgccacgcagttcgatgatcagggcgtcctcatctggcgaccatttggactgcttcttggctggagattcggacgtatgcgagggctgcaggcgcttggcagcacccgatggaccggacttggtcaagggtggcatcaccatggcagccgggcctggcatagtcatcatgggacccagaccgagtggtggccctatcgttctgggcgggtacccagtgttcaggccgggggcggcttcttcctcatcttggggcttgagtagcagtgagatatccactttgacaggaggcaatataggccgattttgtaacgcaatcatatgcgcggatgagcaccggtgaatagaacagagaacaaagcagcagggggatccccgactagaggggggaaggggataagaagagaaaagagggaaggtgctcgtggacccaagtctttcccaaaatatgacagaacgatccaacgttctccaaagtgttcttttttttttctcgaattgaattggatgaaatctccaggatatcagagaatagaagtgaggggaaggaagtatggaaattgaagaattcaaggattgtagaattggtacagaaaagggagaagaaggaaaaggacgatatgaagcattcaactcgaaggtgaaacgaatgcagaagtgacagctgatctaaacctatcttgaagcgaagggaggagaagaagagtcttagaccgttggggggtggactattaagggtaacggctgttacaaagtaaaaaatacttcaatatccactggttttaattaaagatgcggtcagttcccctggtctactctgggtgatcttcgtcatgctggtctggatttttagatcatccatcctggtccaagtcctcaggcttgcgatatcactggaatggatataaatagggcgactctcgagagctatcgactgcaaagtatatagacgggcaatgtttgatatgacctgcagagtttcatactaacccagagaaggaatgaggggcaacgttctatgggaccaaacggtatgtaccagagtccttaccataatgtaccaggttaaatgatggctaaagccgactaattaattcaaagtaatcccaatggggccactcctttgggtttgtgtttttatttcaaacttaaaaaagtcaaaattaatccagaaacattaaaaaaacattcaattagataataaatatataataaataatcccaattcaatttaaatccataaatcaagcccggggacccgcatcaccctttggttaaatgagaacggtcttctccggtccagagtccagcccgttgcaactaaaagttccagatctttaacggctttttgggaatatcttgaattccttgggggattgaccaggatatgtcacccttggaaccagtcggggaattttctgtgattattcacttccaaggttcttccccccttgctcttgtttgtggggcgttcccgactctcgggtgtccatgtgtttattccttctggtataagtaccttattaaagagagagagatatagaggtggtgggcttcgaagccgaatggaacattctataaggaaatatctatattttttttttttttctttaatgaatccaggacctgatgtctcgaatctggttctatacatctcatagatttaagattggtagggtaatttgctttccctcaggctaaggtcttagaactggctcttgaacgacggggcacgcgttcacgcatttccaagattaagggactggtgggtcgaattcaatttccacaatttccacaatttccacctttttgacagccaatttcccgtacaatgcaattctagtgcacgtgatgcctctggacccagaaaccgggcatcggcttggggaagtcttattccacggagtagacaatatagtactctaactatatcatacactctatctatgagtatatctttacttccattattctatccattaccacggacttccctatatgatactcccctttcttcactccgacgatcagtcttcctgaaacctccgttcagtcaatgcaccgaggatcagcaagctatccctcttcctgttcgtactttgtactcccgggcctcgaatcctgtctgtcaactttccaacccatcaggcaacaaaaaggcaaaggcaaaaaaaaaaaaaaaggaaaaaaggaaaaacagaaagtcgaacgtgtaagtggatcatgtacaacgttcgcaaggcgatcgttgcctcccttggcttcgttcggagccagcacagacatgacccgttcggtagctacggcttcatcgaccttatgatccgcttggagcaacgggggggctatccgtagaccaatgtctagattatatccgagggggaatgaccggtataatggggagaggtataaaagtaaaaggaattcaggccatgcttcgagggcctgggggtgggagggagagacaaaagatatgttaacagtcagacgcgggagggaagaagccacaagtgtgatgatacaggatgtcgccctactctaacggcgcacacaccgtatgtacagttgagggggcaggttcagccaaccatgaagaatgaacggggtggagtttcaaggaggggcaaatgtcggatcatcatgactatgacttaagtggtagcgaagagctggtggcgctgcgcggagtgtttctcttttctatttattgtcgcgatcaccctaaatatccgacacgcacccgttggacccggtttttttggtcgtttttgattcgaagctcattattttgccattggtatcatttcagatggatgcgagtgggtttctcttatatctcactatgtatgtacctaccactagccacatatgcactgtgaacggagaattaactgttccacttagatccgtaggatcatctgcttcagctccagtggcgcccaaccgtttgaattggggcagtgcgctcaacggtggatcttcggtagatggggaggaaccctgctgtcaacactccctacggagtacactattttgctatggatcatcgggggaggccatatttgttccgaaagtggatgtatctcaaatatgtacgtatactaacacaaagtacagagaggcacagagaagatcccgacaagagaaggagcacggtatagctttcggccggacctcttgatattccatggccaatcatcagcctggagatttctatttcatttggctccacatctgaaacagctgctgtgtggtcaagtcccttctagacactagacactttaggtggaacgcggttcatttgcacggagtatttctcctacacttgctccatatgttgtagtagacttaagattatcggtctcgaacattcttctgcaaaaaccgggggaacacggccagcaaggaaattggctgattccagcccgtttatggtcccattgggccctgggatctgactgggaagttcaccgagatatcctgggaagctgatttcagagatgcagtacatttttttcatctctctttgaatatgttctatgtgtgtgaacagcccgctatttatagatggtttctttgttgtggatgtaagtcggcttgggatctggtaaatggaacagctcaaagtctgtgaaggaacaaaataatcaagtgtaagtgggatgggggttgaatgaaagttgaatgaatgtctcgagaattcagtagagttcttgcctttctttgatcaccatatccctgattcattggttccatcatgcattcaaagaattcccaatcgatgccacattttccttggagatgagaacaatgaaaatcagttgcaatgcgagataaattagactgcgaccccctcaagtgagcaacagcttcacatattgattcatttcatattctatcatggccaaaactaaacaagtcccaaagaaagtcctagaggaagaggaagaggaggaagtcgaagcctcaacagcgcaaaggggaagatcagacgaagagaaaatgagagtgagtgtagccaacctctacatcaacaagtctaacaagagagatagaccgtcatccccaaacattggcatccagccttgcccaataagaccaccgtgggcttgcccaatgcccgggttgactgctatcgaaatgtcgtcttccaaatgcttctgcatatgccgattcttcacaattggctcatctggtatatgaaccaccatgcccctaggggttacgtttgcaagatgggtgaagatttccgcagatgccaagtttgcgaacttgccgaggtcttccaaagttattgggcaaatgaaactagaaattggatctatacctttagatatctagcaaggacgatcttacttaagtggaaaccaaacggcgagaattcggaacaagacccagcagagtactttgtgaaagtttacaatgccatcaaagagggcatcaggcctatgatgtatgttattctctccatattccccctacacgcagaagactgacttgagactccaggaaaggagacttcgaagatatgttcgaggtcggaatcatccagaggagagaatgtgctggggaaaacccctgtgccccaagatacaccccgagccagcaaccggtcatgctgctcccattttcagagcacaacacactccccgccaggcctactttgggcgatgtagtcaaacaatactttgaaaatgtagacgatctcggtacatgtccggactgtggaggcaagaagacatccaacgaccgaattggacgttttcctgagcttctcgtgatccagctcaaccgcgccaatgattttggccaaaagatccaaacccacgtatatctgaccgagcagttaaatatcgagacacggttcatggatgaacgctggggcaacgaacgaaaagtcgtccggtataaactgacctcgatggtcttgcattttggccagcatgtacaatcaggtcattacatgatcgctgtcaaaggtaaaggaggtcaatggtctatggcgaatgacactcaagtcaatgactgggaccccgaaggacccgagagcagcctggactatcccgctacctgttatctctttacataccgccggttacccacggaagacgaggcagagaaaatcccagatgacgaggccattcaggccgactccggtttatgctcggacgatgatgtgtttgagaatgttgatcctggcctaggattacctccggtccctgagaatactgtcgttaagatccctgagaacactgtctttgagaattctgtctttgagaagtctgtctttgggaattctatctttgggaactctgtctttgggagctctgtccctgagaactctgtccctgagtcaggcgccagtgtctggggagttgatcccaggacattggagaagttactggaggtgatcattcccaaggccgtcgatacctatatagcccgctcagcggatgcgaggcacaaggagtgggatcaatggtcgaaggaatgggcgaaggaatgggagaagagaagaacagccgaaggagcgaacacaacagccaaaggagcgaacacaacagccgaaggagcgaacaaatctgctatttgccctggttgcgacaaggatatggtcaattggcagaagcaacgaggaagacttcaggtaactttgactgaaaatcaggggaatggggaaaagatcctagacctcgaagttcaaggtctacactacaatcgactcaagaggaaggtgggcaaggaagccgataaggcagaagagtcagcaattaccaaggtgataaaaaaaaagttgaagagcacagcgaagggagatgaagagacggagacggagacggagaaggggaagggaaaggccaagccaaaggtgaaggatacagcaaagggagatgaagagaaggggaagggaaaggccaagggaaaggcgaagacgaagggaaagaagaagtagaagttcaatatctcggagtttagttttttcttcagttttcaatttcaatttcaagtctcaggtttcttccctctttctaccacaaatggattccaattctcctcacatcttcattgatcgtttaatcgctgaattgtcacagccggcactgtcaaagactataaaaccactgatgctaacattgcactgtctgtttccaaatgacttcctccctgctcttgatatcctcgatcgcaaactagtacgtcggattgtacgctcagatcgatcttccacatcccagatccaagaggacattttcatcgtattatctacatcaattccgccttcacttcccggctcctcaatcccctcccaagaaaagggctatgaggttaggctgcgtgcctggaattgcagctgtcctacatttaccctgtctgcataccgagaccctcaactcctgcatgattcgacaaacaaacagaaccagttggcctactcatttggcggaaccttagctcgtggtacggctcgggtgtcgcctcctacctgcaaacatattctcgcctgtattctacatgcacggtgccctgagctgttcggggttgatggggatgacaggctcgccgtttccaaggaggaactggcaggctggtgtgctggttggggtggttgatttgcttggctcttgacacgtcaacgcaaatggatgtacgatgaattttacgcacttgtgtttgtccttgaccctgcggcaagctgctaagcgaccttatgaaacccatcctaggtatctgcagatgacaacaagtcctacagacccttgtccattccacatgagccatctgcccgtgtccggacaatcaatcgttcaaagtcggctggccccgaatggagacttgtcccggagctcttaagattgcgggatgattgtatgatagatacaccaatggcagtgttattactttacgagatagttgttgttcgctgtgcaaattagacagatctaaacataggatcttggccctgactatccaatgtacatgagatacaagaaaccccggtttaaatgtggtatgtttaactgattggattgataatcctttccggaagagaataaattaagaaaagtcccctagttcttcttcttgttcttgtcggagctatcctgctcctccttctgctcggcgtttggtgggccggccttcttagcatccttgtctcccttagttccattggcctcctggtcccgcttggtgtcactctcctcttgctgctgtcggttctggatcttgttatcgattaagtcgtggaaagccgtgatagcacgaatcaagctgctgatgtagatagccatcaactggtcattagtcttgacactcatggcccgtgccaactcgctgttctcgatctgcggctcctggccgctggtccgctgcgttgccggtggggtggacagattgggaaggaggttgaaaacatcctggaggttgcccagaatggcgtggttgacgggaagttccttgtcgagaactttttggaggtattgaccgatatcgcgtagccgcagatgcaatccttgaagcgactgcagctgcgacgtgatacgggtggaaagtgtgccgactgcgacgtccctgatgtctcggaggaggtgttccacgccaatctcctctgcttcttctgcctcgattatcgacggggtgtgcacaaatgtccgggaagttgttgttccatcctgcaagtaagaaaaaaaaaccccctggttagcgctgatggcctgatggacgcttcctcggattcaatgcaaactcacatctttgatttcatccacagcgaaataagcatctgtaggtacaccaacctcctttggttgtacatcaacaataaccagcaaggggttgggcgtgtatttcttgaagagctcattgatctccaaatccgaagcgcgcagcttgggacccgagtggtaccagccgactagcttctcgcgagcattgattttcttgaacatatccctcatcgactccacgaagttgtgatctaaaaaccacaccgatgggtctttttcatcttcctcgaacgggactagagagatagaacagatgtcaactcatctcttgtatgagtttaattcatcgaagcttgcacttaccagcaaaactgtttgatacccggacattatcgcccgagttctcacccagcagcacgcctacaacacgttttttggtaccctttgctgttctcccatagtgatctgcgacggagaggaggactaacggggcaaccgtcacggagcggttgacgagggatagcgtgtccgccgtggtggcaggcatcgtcaaagggagaaaaggtgaaaaggaatcgagaggtgtgaaggatgattaaaggtcgtagatcaaataaaatccaatgaaacagcaaatcaacgcgagacaggaggatgcggtggatggagagcgatgatgcacaggtgctcttgagagctctccgccacagctgcgccatcttgaggctggaggacttagtaagcggccaccttgcactttccccggtgaactgaggaaacttggactatggaggtgtatagaatgtatatgtatagaatatagaaaagagagagtagatagagaagacagagaatatagagaatatagttatagatactgaatgtcaattgtatcagcatctaacctacacatcgcctctacaaaatgtcttcaggccattttcccccattcccccattccctcgtgaagcccgtgctctccgaacctcgggagctaagttcctcgcgaatcttccctttccccatttctccgtttccccgtctacagcttttctcttcttcagaactctccccccttacaattcacaatggctcccatcactgaagatgccctttccggcctgaagaacactatccaccagctggaggcaaaggtgtccgagcttgagaaccgtctcgccaatggcggcaagcccaagtctgtcgccgaacagatgcgcatcatcctgatgggccctcccggtgcaggtatgcgattgaactataacgggaaaaagaaaagaaaaaaaaaccgatggatattaacagtttcaaccaggcaagggtactcaagccccgaaacttaaggaaaagttctgcgcgtgccacctggtgagtagaaagtttgcatgagtacagcatgagctcttcccgctgatacatttcctgaataggccaccggagacatgctgcggtcccaggtcgcgaagaagaccgatcttggaagggaagccaagaagatcatggaccagggtggtcttgtcagcgacgagatcatgatcaacatgatcaagagcgagctggacaacaactccgagtgcaagaacgggtgcgtacatctccatttccctcccaaattcattttcttccgaggcccggctagaattaacacgagagatgaacagtttcattctggatggtttcccccggacggttgcgcaggccgagcgtctcgatgacatgcttaccgcccgtgatcagaagctccaacacgccattgagttgcagattgacgactctctgctggtggctcgtatcaccggccgtttggtccaccctgcctctggccgctcgtaccacaagatcttcaacccgcccaaggatgacatgaaggacgacatctccggcgagccgttgatccagcgctccgatgataatgccgagaccctcaccaagcgtctgtctacttaccacgcccagaccacccccgttgtcgagtactacaagaagaccggtatctggcgcggcattgatgctagccaggagcctggccaggtctggaagagcattcttggagtcttccgccagtaagcgattctgttggattgattgcatttaaaaagggggatttgggaggtgatttgggacaatttaccggtccaggctccgtgatgcctaccttttttcctatttttttctttgggcatatccgaagtatggctggtgttctcgtccacatatagacgtgggtttatcccgttgaccgccatgtatagtagtagtatgtgtgtactttttgtgagtactctttgagtaccgaatacacaagaccggtacgcattcaattggatatgtatttggtaaatcttatattctgcagtctaattccttccgacaaggcaacacacgcggagatgtgtgtatttgcctcatactagtattgttcaaacttgccctggaactcatatctaaagttgtaggggatactcagtcgactcgatcttctgaggataggccaaaccaccctgctttcgcacctcatccatgacctccataatcacgatactctcttccaacggcatgccttcactctcgagcttgccatcgcggagacaacgagcaacctcatcagcctcccagtacatacccttaccattaccagggaacgggcactgaacctcacggatctcaccagcacccttcttgggaatgatacggtagctctctggccggaaaggtgggccgaacacctgaatctcacctttagtaccctgaatacggatggtaggaccagccgagcccttctcatcgggatcagcagagacgcgaatgttggtcatggctacaccgtgcgattgctgtgggtgcgggccattcgagggcgtacttgtcgggaaacttagaatcatggttgtacactcgtctgcaccggtgaggtggtaaggagtcatctgcgagagcacagtgggtggcctcctctggtctcgaggtagggtgtggtacagagtctggaagacccaggtcagagagtagatacccactagaagagcaatcagtcaatgttttctttctcttaagcctagaaaacctacaatccaggagagcaccaccggccaaatcagggttcaccatacggtgtgtggtaccccatttcgtctcaacatcatcaccgaagctcgtatcagccacgacacggaggacctcaccgatctcacccttctggatgagcgcgcgaatctgaacgctgagggggaaatagcgagtccaaacggcttccataaggaagagattcttcttgcgggcaatctcgatgaggatcttagtctgagcagcgttgacggtgaaggctttctcacagagaacattcttgcctgcctccagcgcgagtctggcattctggtagtggtgggagtgcggagtcgcgacgtagataacatcgacattggggtcggctacgagagtctcgtagtcaccgtatgcggagcagggggttgtgattcctcgagccgagatgaattgctcggccctttccttggatgaggacgaggcgacggccacgacttggtgggctacgtcagaggcatcgcggacattcgggtcgatgagaagatcatctgtgaatgctgttcggaatgggttaattcatgggttcttgtcttatacacccaggtatgtagaagtgaaatcttactctcggcgatccagccagtggctatcaatcagttagctttgttttgttccttttcggtaatttcataacaggatctcgagatgtcatacccatgataccccatcgaacaatgtgtggcgccatgatagtaaacttgaagacaagagtcaatacaagcgttcagattgaattaaaacaaagacaagtttacataggaatgaattccgaggggaaaacaagcgggggtggagcggggcagcggggtcgtgtaggatcctatctaatgtacaacatcctacgtggatcctccgtgggtgcaacgtggatgcaacgtgatatatagttacattttgtaagtagatggactcaattcgctaattaacgccaggaagatattccctatgcaatgcaataatcggaacatacaagatcattagatctcggtcttgatgcgcatcttctgacttggagattcagtgccctaggtatggttagctctctggatatctaacacgcccaaagaaactcacttcggcttttcgtttgcccagtacagagtcgggtgtgctggtccgtgcctggcgcgtcggtgcagggccctttgtcacttcggaataacagctggcatgatacacacgacttccgaccttggttgcgtcttgccagatccagtcctgcacatcttcagaccaggtcgattcgaatttctcctggcagatggggcatggagtgtttcggagagtggcatcgttcggggctcgaatccacggctttggcggctcttgcttcgtattgccatccgcgcctgcagctccctcggcggtggtttggggatctgcagcgccgttctcatcgccagcctcgcgggatttgatccagtcctattggagttagaaataaaactacaagggatacaagagatagacataccctttcgtcaacataccagctgcgattctgagcccgccgggaagactcggtcatgcgctgattggtcttgaagtgccagtccaagtgccgggccttcatttcctttccttcgtccgtggtcaagaaacgacggccgcaagttccacatcggtttggtcgggaatcataaagagagacaataagcccaaatcgagggatcttcatagatgcggtgctcatggggactccagaggatccattaggaggaatttgagtctgagacgaagctgatggtgtaggttgcattccatggggcaagataaacggcaaattagatctaccagaaactggtgttgaagtcgaaggcgtaagagatgggggtgtcggtccactaggtagaagcccacgtgccctcaaggccgcgataagaggattctccggtgctggtggaggagggccgctttggtgatattggggcatatgaggtagcgctgccggcatttgaggaggtggggtggactgttgacgcgaagcggtagttttgatcagctcggcgagagtgttatgatttaatagttgctgaaggggttgcgagactggttgcgctggtggtgtggggatttggggaggaacggacactgcggggccaccattcgtagcagcattagggccaaccgacggtggtcttgtggcagcaagggcagagacctgatcacggacaagtttcaactgatctggggcgagctgttgtttctgtagaattgcctgaagatccaccaatgctttcaagcgttgttgggagacaggattgaatggactgttcgcaaagtcaatctttgcagaagcgatcagagcatccacgtctcgattgaggtagctcaagtcgatatcctgtcgatgagtctggggaggtgtctgtgagaacccaattagcttcagatgtgacacacaacgaaagtagccttacagaattagaataaccattattgggatactggtggttttgtggaggccgagacatgttctggggtggtgtagagctgttggaccatccagtcggagtcccatttccacgattacgactgaggatgtccggttgggccctggcctgttgttgttgcaaagccgcagtgcgtgctttgatgagagcactctcgatgttgcgtgtaatgtcgggagggaagactgggcgtgtgtccaaggagcctggggccggttgcttccatgtgttgagcatctcatccagcttcctccgagtgtttccatcaaccagagtataaacattcataaatgtctggtacatgttccggccaaggaagagggtgtaggggcttccgacgttcttaacgatggagtcggctacatagagggctggaagcttctgcaggggtggtgtctacatactggttagtactcatcctgtactacgccaaaaaaaaacatcaggagcacctactgatcgaatgtggttctccaggacccgggatatggccattgcgtgttcggtattctctttggcgatgacagtcaaagtgcggatctggattccatcattggtggttaggtcctccaaggaactcttgtagtcctccgcaatttcgtccgaaatgagaccggacattatggcgatgtgggatgagtcgagggtgatctgggattttaaagatgtcgagagaagaaatcaatatcagggcgaagttcagcacgtggtcttgatttttttcctcctgctcctttcttccactgctcttgttccttcgagtgtgtctgtttcttttcttttcttctttttcttcttcttcacttcttcctttggggtggcttctgtctgtccttctttcctgtgactatcaagactgtcttcttttcttcttaatccttgtcctcgttccaaggaacaaattctcttggatcaacgcaaagatggagaaatagtcggaacttgtaaatgcttgctagctatcttcgcgagaattgagaaaacaatagtattcaaacacttgctctcagtccaatccaacccgtgaccttccagtgcccttgtatatctactttccagtcgaataatcgccgaggggtggtgatggaagggaagaaatgcgaggccgaaaagccgcggaccgcgaaaaaaccaagcagatgcggcgaaacaaaagagactaccaagatgggtaaatgcaagaaaacagcgctgtggaggagtgaagcaatggaaattgagagttgacaagaaaaggaaaaaaaaaaaaaagagagataagtgaaatagtgaagtggtgagtgttgaggtggtgaggtggaagcgccgaagagaaagggattgtgagatagagtcatgtgatcgtggaatgacgcattcaacttctcctcgacttggactgacttaccttccttcgtacattcaatttatttgaaagagatattattacatttttcaaatatgaagcttacacttgctaccctgctagttctaccgctggcactggccggatcgctcaagtccgtcatcgtcactttccccaagggaacgcctgactcggtggttaaccaggccaaagcctctttggtggcttcagtacgcagtgcttctttgttgtcatgaggctgttatgacactgtactgacacttttagggtggtgttatcacgcacgagtaccgtaagtactacatactaccttgcacatttagatatagagataccatttcatcggtactgacatacatctcttatcagatttgatcaagtatggttccaacggacgtttctgtcttataacctgccttctaactacgactttagtggattcgccgccgaggctcctgcgagcgctctccagaccctctccacgcaggatacccaatacaaaccgaatatcgaagaagataaggttgtcagtgcgtatggagactacgcagctgcagtctaatatgccatctccaatgagataccggttctgaatctcaaagcgcctgagcatacatatcatgacgtccaaaggcaaaaccacgtcggaatgaaccaatcagaattacaccatcagaatgatttaagtgatctaacgcaacctcgaggcttggattgtatacaatgtggagtcaatggttgagtccttatgcttcagctaagggctttagggggggggggcggacatatgaatctgataagtttacatttacactcaaaaacataactacaatgtattcattattataattcaagacctaagttatgtacttcgtacagtgtacttagtagcaaatcaaagagcgtagacaacgtagggccgatcatcctcccctccccccccccgctagttaactcccgtccctctggcccccaaggcgcgtggatctggaaagtccctcgagagccgaggccttcgcgttgcaacccttcacttcgagagtcttggaaatgctggaattgctggaattgcaggcctctttgacactcgattaaacgcgccgccaaaatgggatcggaacacacggtgaccaaggttctgttggaatggatcaacagcttcgccttgggtaaaaccctccgaaccactgacgaattaaccgatgggattatcttgtgggagattctccaggatattgaccctcagtatttcctcgaggaaatcccagagcgcaactcctccgaccattgggtggccaagtggcagaacctgaagcacatccacaaactattgctcaactacattcgacaccaaaacgatgacatcctaccttccggtctcgatccgtcgcccgatctcgaatcaattgccgaaaaagcctctcccaaggaaacgaacaagctgctgaagcttctcctgatcgcggccatcagctctcccaacgccggaacatacgtacaaacacttcaggaactaagcacctcgacacaagaggggctcagagatattattgaggaggcacacaatggccaatatgagccaatggacgctgcggatgagctcagggaagacctagccaagcacgatcgccctgtggatctggaactgcagttcgaggaacgcgtcggaaaggtactcgcggagaatgaccgtctaacacacgagaagaaagaattggaaaaggccttgggggacttgcacaatcgcctggcgcgtctccaggaaaacaatgacaccctacaaaaccgtctcgcctccaccgaggaccggctggttaccttgaaatccggaaagggtgatatcggtcacaacgcaaaggcattggaaagcaagacccgtcaacaggatgatctaattgcctctcaagaagcaaagttgactgcggcccaggacgaaatcgacagtcttcgcatggcagtcgagtccttgcgcgtcaagaaccagcgctatcagaagttgcaggatgactatgacgagctccgtaccgaaaaggatcaactggctcgcaaggcaaacgcagccgagaaataccgccaaaagctgcaagccagtcaggactttgagaaagagaaccagacactcaagaaccaaatcaaagatatccagcaacagctaaaagagtcggacgcacagcagcgttggtcttcggagcgcgatgtggaactggaagaatatcgcaagcttctgccacaagttgagcaggaatgcaatgagatccagaacttgaagaaacaactcgagttcaataatcatgcgctgacagaacgattggagagtgcggatgaacagcacgagagggacgatgctttgatcagtgaactacgtgaacgcctcggagaaatagacggcttgccgggcagcgcgtcgcctggctctgagacgccaaagatgcaagggacattgcacaaggactttgagacgcttggtgtcaaagaatcacaactgtatgtatacattttgccttcgtggtcttattggatgctaactattgacagtaaatctgaggatgatttgaagcgggaaaccgagtccgttaaagcaccttcagctgtatgtgtgccatctgttttctgtgaacgtttgttgatactaataaccagcagccagcctctcatactggaggcttctctgaaaactttactgcatccgtgcaactggcgcgctctggttccacccaaaggtatgaattcccgacatttcgttcgtttcagtgaacagaatatttaacatgccttagtgacgactactggaaattatacgagaactataccggagctctcaaaaagattgcagaggtccaggacaccttggaaacagctaaaagagacctgtctgatacacaagctgaacgtaagtcttttattgctctggctctacacatccgagagaaacatgtgtctaacaatcttgaagttggccttgtcaatgcggaacaggtcgagatgctccaaggactcgaggcgtataactcggctgaattagcaaaagtccgggatgactgggaagcccttacacaaaacgtccaccacctggaggccgaggtcgatgcaagccagacgctggtgcgtgaagtctgtgcggaacgagaggaactccgcaagatgctcgacaacaagcaaagcgagatcagctccgaagatcaggaagttatgaacgagatgcagatgcttctaggcgagtttgaaacccacaataatgagggcggcgaagtgccccagaaatcgagcttcgagctcttgaaacagtgtgcgggagttctggagaagaatgttgaacggcttgctcagcgtgccgaggtcagtttccacgagagatcctcgctacgtcttatttgggttgtgtttgctaattctagcatgattctacagtacatccagcaacaaaatgagctggtcaaatcactccgtgagcgtatgaagaactatgaagaaaacctagacgatggcatttccaaagagcgagaggtaagtcaaagatggagctgttaggttctagcggtatgctaatgacactttttagcttgagcttcagaacattatcgatagccagacccgagaactcaaccttgtgggctcggcttggtatcaccttcagagccgatggcagaacaacaatatgacggtatcgcgatatcgacatggagccagcacgggagattctaagggctggctagcaaagcaaagaagcgctgttgctgggtagtggaatgccctatgaatcaaattcgtgccatttttttttttaacatatgcgttatatttttttcgtttactggtttggatgttgagattcccactatacatcccatcttattcttgtgattatttctacagcaatagaatctatgtcatttaaagaaccccagagtcttgattgagccagatgaatccattttgaagtagagtgagttcgtcgcattcggaaaatgtaagctacctaagtagatccccgcaataaaagatgtctatggaaaatacaaaaagcctaggtaattggcctagtcccaagaaaggagaaatagaaggggtaatgcagaaattataagaaaatggtctctatacaacctggccaaaagcgggaatcaaagtctgtgccagccagaagctgaagaccagcttgggacctgtcataagcagcttgggggtcagacccttgaagaagctggtggggccctcattcttgagcatcgtggagacaatcttgaagccagactcggggttctcgaagttgcggttctggatacgcgtcttgatgacatcgaggggagcggacacgactagggaggcactagcaccgcagactgaggcgacgaagttctggccccaggtggcagtgttgtaatcggtcagtttgtaaatcttttccttggcgaaagcagatccaccgaagagctgtaacagatgttagtgggggtccagtgatagtagatcgggggaaagcatacagcgaaggacccaggggcgttacgggcggcagtccagccagcaccgcggtacagacccataccctcatcggcaataatcttgaaaagaccacgtccacggaaggcatcggggttagtctggcgcttaatcttaagaacgtccagaggaagcagaacgatctctccaatgccgatcaaactaaaagatttcgagtcagatagatccttacgcccaatttcaatttttcttaccttccagcagtggcatgcataatggcctttccggtacccttgccaaatgccttatcgaagtcggcacggtggtgcttgtcgaggtaatcgcgtgcgaaaggctgaccaccgtacttgtagatgcgctggaggacctatcgatttaaagaatagtatgagctgtctgttctcccaatcttctgctgtcgataaaatccacgaaccttgtaaccggcagcgtatcccagaccggggaacaaagaggtgaacttgcgaccaattgaggcattgacgtgctccctaaagacaacctccttgaaagcggtagcgctggagatctgtcaaggatccagtcagcaatagatacatcttcattcgtacacaatccgaatctcacccgggtctggttgctcatcaatcgcttggcggtagtgtcaacctatggacgtcagtgtctggtcgcaactggtctcgaatgggagaatatcgtacgggatggaagatcagcaactcagcaataccggcagagcctagaagagtcagatttgagtaatgagctcgtattttgaacatctgacgacttaccggaaccaaggagacgagcagtggcagactccttcttgacatccttggggacagcgccagcactggtggcaatagcggaagacattttttttccaagtttgtcaagtaatcccaaaaaagagcaagagaatgagaacgccgatggattcaggaacatgtgctcggagttaaattttatcgaggcagacttggcactagtcccgtttgggagccgccatcggagagccaaggagttgcgaaaagtcgtataaatatgtatgtatatatggaatcatatgtatagaataaaacgatgctacttaagaggtatcaggaagcaagttgcactgtctaatctatttattccgagtatatgactccatctttgtacatctttatatggaaataggtggaatcacaaccgcatcggagtcatttgaaagtgcctgaaacagattcctttgatacagcatgaccgtactccgtaaatagcacaagtgacaaactgcatcggcacttgcacagcgctaatatctgctgtgggggtgaggaactacttagggttagcgtttggaacattccatggtaactgccgaggatattcctagtataatcagatctaaatactcctcgctacctgttttgttgtttactcgttacttggctcgtggataaagaactcatattgctcctaagtgtaaatcacttcatctagcctgatcagtggttcgtttccaggtcggtgctccatcattgctcgacggtacaaccaaaacataaagaaatttgccaaaaggatccaagaatattaccacaaccagaaagctcataatgattgtagttgcagctaaagagcatagttgccaagcaatgtgaaagaaaatgcgcagaacaccgaatgaaacgccagtgacccaaaaccagtatcccaaggtcgcaaaagccttctcgcctgcccgttcatccattattgactcactcgtgcaggttagagtgaccgagcagcaaagcaaatgagagagactgaacaacctctacaggtcaccgaaagtgttctcgccagagtatctaaccgttatgtcagtatgatttcatttataaaataaaataaaaaaggagaacatacgtgatgtataagaagccatcttcgtccttgtgctcttcgtagatgctgctcatgagcgcggcagttggagggaggacctcatcaacgaagatgaagatagccttctcaggggagagctttatgcgcttgcggatcacatagacaaactgtcccacggtaaggtcggccggtactaagtacttcttcttgtcgatggtggcgatatctgacttctcgaccttctcgcagatgacctgtagattaggggagtccgttagctaccgaacaagcggtgagggtctgagagtttggcagcaacaaccacctccgttggggagatccctgggattaaagatactcacgggaatcctgtcggcgtatttctggcgaatgcgttcggcctcagcctttcgcttctcgaaggggtgctcgtccttgaacttggatcgcatcgtgactgataagggtcgataagtgagagcgggtcgcgtggagggtaagtaggatcaaaaaaaactaggaagctctggtgcgaggttggtagaaatagtggttttcttgatgggaaggtttggatgtgaagtagcttgcaaaaagagagatgaagaggggtgatagaggatgacaaggcgactcccccgctgacgttacggtaataccatcacgggatccatgggcggtgagtcaatagtcacgcggcagaaatcagatgcctcgggctctgctcacgtgaatagcaaggcatatattatttacatactgcatcagtagattaaaagagttacctcccaatatactagtcaggtcttgaatatctagacgaaaagcgatctcaatatcggggcttacacgtccacgggttattgccccggtgctgatcccggggccgcttatcgtgcttatctcatccagccaaacagaccaaactcagctctaggagagtcgtacgatttgagatgttgcgtggtattttgctaaactgttgactcaatccaacttcttcctcatatcattctttatacggatccgggataccgctctctcggtttcggccattgaccttttgatactttgtgctggcagccatacgcgcaaccaattctattccaaaatggccacccgatcatacacgcctctgcggaggtcactagggcagttgtctgctcgaagtactcgcattgctggccgccgtgctggaccctcatttcgcgggtattctacagagcagaaaccgcgtgagcccaagccattcactgtctggaggccatacttgcgcctcgccattggcgtgcctttcatcggcgggatcatatactcaatggtatgacacggcgcttcaaaatgcgaagaaatcaatttgctcattcattccagatgacagaagaagtcacggaactcgacgctccatccatggttgaggtggacgaggccctaaagcaatcgaaaatcaacgactcctcgccgatgcggttacggatggaaaagctcatcaagcaacaccagcagaagatcatcgaggaactaggcagagtcgatgggcaacaattcaagactgatacctggtcgcgccccaatggcggcggcggcatttcgtgtgtgctgcaggacggaaacgtcttcgagaaggcgggtgtcaacgtctccgtggtgtacggcaaattacctcggccggccattgagaagatgcgtgccgaccacaagtcctttgttggctcagatgtggagtcgctagatttcttcgctgccggtctctcgctggtcttgcacccacacaatcccatggctccgacggtgcatctcaactaccgctacttcgaaacgtcagatcccaaggaccctatcaacggggacaagaattggtggttcggaggtggcacggatctgactccgacctacctcttcccggaggatgctcagcacttccacaagaccattaaggatacatgcgatcgccacgatgctacatactacccccagttcaaggcctggtgtgacaagtacttctatatcccccaccgtggcgagtgccgtggcgttggaggtatcttcttcgatgacctcgacgccaacttccttcaaacatccgccggttcctcctccaacccgcaggagacactgttctcgttcgtttcggacagtctggcgtctttccttccttcctatgtgcccatcattgagcgacgcaaggacatgctgtataccccggaacagaaggagtggcagcagcttcgtcggggccgctatgtggagttcaaccttgtctatgatcgcggaactagctttggcttgcgcacacccaatgcccgtattgaaagtatcttgatgagtctccctcgtaccgctagctgggcgtacatggatcctgtctccggcacaaggacagagaacatgcctgtggatgaagatgacctgacggaggataaggccagcgagaaggagattatggatgtgctgcgccacccccgacagtgggcatgattgattcatatgtcatgcttggtatatggtgtcgtgcggtgttttcttgatttctatatgtatactacctaaaaaaactttgtagagtaaatgtggataattattgagctaggtgtctctacagccattcccacggcaagtcttaaagggcactcgagatttaatattcgggcacgaagcccagactgataaaaaaaagttttcattttcgatcgacttcggattgttagacagttgaagcaactggctctggtactatccacatctgtcttattttccgttcatataggcatatatttgtcgaccttacatcgattggtaagatggccgagttggtctaaggcgccaggttaaggtataccttgactccataactagcaatagtttcctggtctcgcaagaggcgtgggttcgaatcccactcttatcattcctttttgtttttcgctcatctaggttgcactcttttcctacttgcatttttctttttggttggacagtgggttatactatgattaaattcatcgagagttggttgtgcccgaggaactttaggccggagcttttgccgccacgcatatgaccatttttagtgatgaggttgttacaacccttgtcggatggttaattatatataatacatagtctatccagagcaatgctttattcctggttatccagtcgatctggtcatacattgctcggcgcaaataagtaatggagttgtgattgctgtctagaagaaatatagggattgtatggggatatttagatctatactcctgaggttaccccggtttacccaacatatcgggtattaggactggtctttccaatgaatatattttggttgtcaggacacatagatgatagtatatggctatcttcaactggcttttatcttaggaaaccaactgttgttctccccaaccacgcccggtaaaaagatatctccatttctgcgcgtctagtatacgctgataggtggcctgcttttgacctagaagattttgacctagaagattgccagtagagatacaaacatgtaattctcctgtatgtgccggggtgatgaatggcccgatacgaagcgaatcagtagaatagtacgcagtctagagcccaacgcatataaaaaggcatattaaaactgcaatcaacacctccccgtgagatctaccaccgtactatagcttggtggtgagcgtgatagtcctctaaaccccactatatcgactgttactactatcatggtctaaaaagatactggtttactaggaaagaacatattgaatagcataggatgtaacaccagaaatggctgtcgtggcggaatacaaatattgatttgttagtaaccattgaggtcttgggatatcggaaaatagcataatagtagcgatgactagagtccctctgtgatttcatcgttaaaccaccttcatagaaacggacaggcaagcggaaagggtgagagtcccaggcatatttgctcactggaggtattacatatgtttagtgaaatccaacgggatcctggaatccatggcatcgtcccagtgttgtcttcatggctgatctcatttagatgggttttaagatcggatcatggccccgtggtatggctgatatcttctcactagcactacaaccgaggacgacgcagccaagaaagtatgatttattcgttttcgctaaagtatctaggtcattcatgggattttggccgtttcctaggggaaaataacctagtcaatagtataaaagacttctgtactccgtatagatttcacccatggccaaattggcgaacaagcaacaactttggagcatgacctcaaaatccaccacccaccaaaaacaactcaattgatctaagaaaagctttatattaaggtggaatgagcaaaaaacaaaaggcaattcgatgacaaccccgatcaacatggtagatatgcttctctagaatcctcgcctgcaactgagccattctctctgtcgacgtcgtaccacgcagctatagtgtagtttgagaaataccgttaagatctttccatggccgagaaccgtgctttgtccctggtggcatggttacttgctctggtttccatgatgaagaccgatcgaagttcgatgtcctgtagggtatttacagttgtcacattctctggccgatgttcaatattgtgatgcgcgcgcttatgtgctgtccatagcccaatgatatggtgggttttgagggcgtgttgctagcatatatattctctctcacattggtagggactgtggggaaactcaaaatccacaaatgaattcccctacatgtatgatttggagtataataaattgaaatgaatatttattgatactaagatattcgacctgtaatgtaaaggaaaaaaataagtaaaaaaaagtaaaaaagaagtgataagagtgggattcgaacccacgcctcttgcgagaccaggaaactattgctagttatggagtcaaggtataccttaacctggcgccttagaccaactcggccatcttaccaactgatgtaaggtcgacaaatatatgcctatatgaatggaagacaatgcatacgggacgaaaccctttttaataacatggaagtatatttattgatttgagaatagtagtcgaatagcactacaaggctacaaaacatacaaggacactctgaaaaggcagacgttttactaaaaagaccacttttacgaatatcttcgtagtcaaactagcaaatccggcaaaaatgctggattattagcccaatttagcaaagacagcataagtatcacactacatatttatactatttttttgaagcatatgagatttcagctgatacctagaattatcccaggataatatcacctcgaataatccatattgtaaagaacatacaacacatggagtagccgacggacagacggggttctagccatattctgattcccataagccgaggtcaaagcccgtcgccattggaccgttacacagaacagcgtagatactatatgccgtacatgcgatgtaagagtggcattgataaaacctttagcgtaaactctgcaatgattaaaggacaggttatgataggcatgattggctcctttttgttgtttgccgtcattggtattgacggtcgtccggctgaagggttggaatggccgattcacgcaccgaacatcggatgatgttctgtctgggggttgatgtcaccaaacggattcatcggctgtcggaattcaaggctcggagaattgaattcatgtttggaataaggtgttattatggcattggttattgttcctgtcggaattgtagttccggtctccaattgagattcgaagccttgactcgacgaatgagataaaagatgagagcgatatcgatacatttatgctgtactccgtacagatcccgcgcacgttgagaaaaactgttgtattcaatgggtatcgggcctgtccataggtctaaactaattatgaagttatatgagcaaatgcatctagactacaaacaaaactttccattccgaaaaccactgcatggcagaagggtatctcaaaccttctctagtgcttcgcagtgacactgtcgccggtcagtttttcgactgcttctttggccctgttcggtggaaaggagatctggttagcccgaggtttcacatgaaaaaggaaaggtggatcgcaatgacgacagggtaaggggaaaagtgtggagaatgcgaggaaagtggcttacatgtcaccaagagcaaccatgcagaccgtctgccagatgcccagaccaatacggggagccacaccacggtagaggccgcggatgccattgttgtcgtagatgtacttgaaagtcttgccgacggtcaagttcttggggcggttagggtcaggggtcttgctctgcatctcgacacggataacctcaatcggctggttccaggcggacagaccaccaccgagagccgaagccaggatcttttcccaggcggacagcttggcgccctcatccttgttggcaaccttgcggatagccgactcagcgagacgcgacagaccgaagcgggaaccccagttggtagtctggcgaatcgcaacggcgttgacaccacggttaataccacggatgccctccttgcggtagatatccatgaaggtcgcgaaggtgccgggaggcttaacaccgctggcagccatcttgtgcttggtgatctcgaccgtcttcatgcaggtacagaaacccatcgtagcgtaggcctgagcgacaccgccagccataccaccgctgataccggagacgaagtcattggcaccgaatgagcgggcgtagtattcggcttcggaggcgacgaagaggagcaccgcacccttggtggatgcctcaatccaggcccacggaatgagtccctggtagtcttaaacatccgatctcgcaattagtttgagttcgtcacatcttgcgggtccgccccccacgcgctagctagacgtgggaaattggaagcgggtattgaatggacacttacaaccgaaaatgccgccacggccccaaatccgacccatagcgcccgcgaagctatcgccccggtttgcggccatggttgtcttggtcacctccagcggcttggggatggttagttgcaatatttattaactgaccactgagggatgccatacctgtcccaatgttgtaacctcaaacaagttcaatcctgcgcccagcaacaagttactgaacttgacaggcttcttctcgagcgtaggggccgaggccgcggacgtagttgtagacattctgggatgatggatgcgctgaaaggggccctgaccaagggatataacggggcttcgtgcgtttgaagaagggggagaactaaaaaagttgaagaagatggattgcaaatgcgtaggaagttgggtggaagggagagaaggagaggagaaggcagaatagcttataaggtcgggggaatcaaagctttgggtcagtaagctggggggggggacagctagtacctggtacatccgatcgtcaccgtttccacttatatcattgggtacccagtacctcccatcagcctcggaaggaatccacctgcgtacttcggagcagttcgcagagcacaattattatttctattttgtatatccgatcgcatgtttgtttacttttacaatatccatgttatatactatgtattctatccatttcacttctatatctttggtggcatgtggagaacgttgagcggtgtcccaacaatatccccacgtgatcgattcaacacaggtagtcctcagaccgaggcgatattctacgctgtacgttgagtcctggaatgatgtactatacaattacggaatagtgttatctttctacatatggaaggtgtagatcataaatgatttgacatggaagttctgttacaaggcccgctcgaaccgatcaagtccctatcatacaacatgaaaattaccaaagactttctcggccaaacaaaggagataatacaaatgtctaacccgggttttcaacgggccccatgggtgatattaaaaaggagatgggaaattcatgcgcttaaagcttggcaccgaccaacttggcgtaggcctcagtgctgaaagacttggggcgctcaatgggcatgccaagagcacggtcgatgatcagctggggcaggacaccaatggcacgggacacaccgaacaggacggtgtagtagctagcctcggtcaaaccgtagtactggaggaggactccagagtgggcatcgacgttggggtaggggttcttggtcttgccgtgctcggtcagaacgccgggagcgatcttgtagacctggctgaccagcttgaacagagggtcatcgggcaggtggcggagagcgaactcgcgctgggagacgtaacgggggtcagtcttgcgcagaacggcgtgaccgtaaccgggaacgacctggccgctgttaagggtggcccagaggtagtccttgatggactggtcgctaaggtcgttgccaatggaggccttcatcttggtgagccagttcaggacctcctggttagccagaccgtgaaggggaccggcaagaccctggagaccagcggacagagagagcatgggggagctcagagcactgccaaccaagtgggtggtgtgggcgctgacgttaccaccctcgtggtcggagtggatggtcaagtacagacgcatcagctcaacgaactccttgttgccgccgaagccaagctggttggccaagttgaaggcgtaatccttatccttctggacagcggcgaccttgccatctttgaagacgttgcggtagatgcgggaagcaatggtgggcagcttggcgatgaggtccatggagtcctcgaaggtgtaggtccagtactccttcttgttgacacccttggcgtaggccttggcgaaggcagactcgtgctcgagagcggtcacggccagagagaactgggccatggggtggagggtgttggggcaacgatcgatgagctcctcaacgaacttgggaacgtcggagcgggcagcccactcggcagaaaggttgtgaacctgctgctcggaggggacctcgccggtcaacagaagccagaagagaccctcgggcaagggctcctcaccaccgggagccttgggcaggagcttttggcactcgggaatctagaaataacagtgagcaagtaataaaacgaaatccgagtcaatggaaacgcacagtgtggccgcggaaacggataccctcctcggcgtcgagaacggaaccctgaggaaaaaaaatgttagcgttgtcgtttgccaggggctatcgaaatttgcgatcttacctcccaaacgagggacttgatgccacgggcaccaccgtaggcctggtcgagggtaacctcaccaataactgtgctgccgtagtccctggaacaattgaatgccatggtcagctactgtttcaatttcaaatacagagcgcgtcacatacttgcggagcttcttgaccttctcgatctgggcgggcaggttatcggcgaaggtgtccttgagggactgggcgattcaactaagttagcattccattgaagctcgctggaaggacaagcaccataccttggccttagcagagtagcagcgcgcgccgttcaaggcagcggactgcaccggcttcgcgatggaagaccggagagtggtagtaccgattctgagggaagaagccatgtctaatatcaggcaggatatgtggtgtgtgtggtatagaggagatggggaagtggtcacaaagcctgggggagaagaagaaagaaaggaaagaaattggggacgagctgttttgcgcctaagattttctcggttcttttcccatctggccgtattacagccggtaccgttggtacggtaactgggcttacttcgggacgccgtggaagctcagtcagctatagctctctctgcagggtgacatgggcttgtaattttccctacacggtacggaagagcacgggctcgggctgccggcagatcaactgtgatgctacgtaggagattgcgaaataccgagagatattaattcaggacatgtgttctttttgctatatagtaaggatatttaggtcgatgagattatgtatttatataagatttatataactactaaacagatgcacgacatattcgatttattcaccagccctgggctggcatcaacatacgtaatcaattccatgcccggggccatggatggcccgggggcattccccagttccaatgtttccaaatttcgcgggcagtactccgtactgtaaatacagttcatatcgtatctctgagaggcaggtaatgacgtcgtaaagtcgccatttgttccgtgccgccatccgtccgatatggaagtcctcgcttatcagatggatataaggacatggatgtccacggatatgtaaatatatctgtacatatgtcatagtgcatgtgatggcgccacggccttgaatagccaatcgccgatcggaagccccagggcgattcggatcccaagtcctatgttgtagggctattcattgtacaagatatacagtacaattgttgtacaacggccttttctaaaatggttcaccgaggctgggagctatatagggcggtagccaggggcagaaccggattggtaaggaccctcggctccgaggtataactagttaagacgttatgcttcatgattattggaatcatgcctgtcaaggtccttgatttctatctattactgtttagtagactctaattattttcccggtcattcctttccacggtgtaacttattatggtacataaaaatgatagtaaaacaaggacacattcatcaatatctgaaacctcaatgtttactgacatgagccctgcgctatttaaaacatagaggttggcaacaatcacctcgacctctctttttagcccctttttgctttactccgtagtgaggcctccaacttcagatatcagatataagattaaaagaccccggttacgggcagcagccaaagacgcaatttcacaattcacgtgacatatccacgataggactagcgctagtcgcagagtcttcccctttgatgacctccattgagcttcatcttcatcccccccatctcagcatccttcttcctctcgatttcatcggtttctcaacctcagttcatccgctaactgcgctggacttcactggatcctcttggactccgtaaaccctgatctggtttctctctgggatctcactgcaaagacgctctaggctgtacatctcccgtactccccgtactctcgtactcggcgctaggtaccctccctggacacaatatcgctaggctgtattccagctgtaggcggctattctctggtcgacagtgaatgcgcccgtggagtctgtagtgaagaatcgccagggactcgattaaacatatcttctttttttttttcataccgaattgacagtcgcgtcacgaaacgcagtagcccggccccctcgattacttcctatctgcataaagacttgactggggacgtgtttcattcattctttcgctactccccttccaaacggtagtatttcccgccatgtcttctgcagtagctgaactggagaaccttctccaatccatgctggccctcaagccgcctggcgtatctggctcaaagattggtggcatcacaaacttgtgcaatgccaacgtgcaggtacgcttgtcccctttggtcgattgattcatctcattggtcctgtgtgatccatgatatgctaaccctacccacagaatgaatcagttctcatccagaagatttacactcacttcaagaaggcccccggctctcacaagctgggtgtgctttatgtggtagactcagtaactcgccaatgggtagaggctgcgcgcaaggccggccaggttcctggcggtgatgcgccggatggaacttacgccgctggtgtcaagcgtgtcactgatctcttgcccatcttgatgacagatatcatcaataacgccccccatgaccaaaaggtatgtaatgagacatccctgtatcatcaaccccatatcccaggatcgcagccctggtgagatagtcaagcttcgcatattgtatccttgcctcgatgtacttcgatctgaagatcctgctgccctgaccaaaccgttttggacaagtaactgacacacatctcgtcaatttaggacaagatcaaaaagctagtcgacatctgggaacgtggtgcgacttttccggccccgatgctcgcttcgttcaaagagaagctgaacgctgctcaaagtaagtccccaatgatgtcaagatatgccaccaatactcacaatgcactagatgtcgaatcgaacacccccgaaggatcccctgcaccgaacgccaacccgatcggaatcccgcaacaatcggcgacacctgatacctcgagcatcctgaaagctttggccgatatggccaagcagaacactaccgcgcctgctgcaccttccgcacttgcgccggccaaccctctgggtgctttcaactcggcctctgtgacccctgccaatgatccaagttcgcatatggctgctgccatgaatgcactcggcgccggtggacctgtcgcgactccctttgcgggtatggccggcatggctcagaacccggctctccagccgcagagtcaaagtggaactccgatctcgatgcccgccgcgaacccgctgacctcaatgcttcctcaggctgcgcaacccgccgcacctgactcaaacgccatggcacagcagctacaacttctccagatgctcgctgctcagggaatcccccaggaccagtggggcactgccttgcagctcttcagcatgaccaacaacaatgccatgggcggtatgccgggtatgcctgggatgcctggaatgcctgcgatgcctgcgatgcccggaggaccgatggctggattcaacccgatgcaaggacagaacattggtggatggggtcactcggactcccagaacaaggacgatcgtggccgtgaataccctcgctcgccgcccactggatatcgtcgtcgttctcgttctccgggctgggatagacgccgtactgcttcgccccctcgccgtcgtgacagccctgtctatggagaatatgaatcgcctggtcgtcgtggagacccgcgtgatgctcgtggccgtcgtggtaatgagtatcgccagcgtagcccacctggtggccgtggcggtagacgtcgctcgccttcgcctgctcgtaacaaggatcccaacctccctccccctggacccaagttcattgaatgggactattcgatcggccagggtatgattaaagtcttgagccgaactcttttcgttggtggtgttacctcctccgaggcccacctgcgtcaactctttggtcagtttggaattgttcagacttgcattgtcaatgtcgacaagcgccacgcttttatcaagatggttagccggaccgatgccatgcaggcacgtgatggaatggaatcttaccgtactggcgagatgcaactcagggtaagtccttctcttgtttttattatccatggatcttatcactgaccttatcaatatagactcgttggggtgttggctttggcccccgtgactgcagcgattaccagactggagtcagcattattccgattgagcgattgaccgaggctgaccgcaagtggatgctttcggcagagtatggtggaactggtggacgtcccattgaatctggaatgattgttgaagagcccgatattgaaatcggcgcaggtgtctcctccaaggctatcagccgccgcattgccactgacactggcggcaagcggggcccaatttccactcgcactaatcccaatccccaggacactcgtttcggcggtcgccgtcctgagcgtgatggatacggtggcggtcctcagatgggtggtgaacttgacatgcctaatatgaacaatcagggagccgcacctgcagttccttcctatggtttcaacttcgctagcatgcccatgttgccccccggattcatgatgggtggtggtcagcccggtatgcccggtgcgcagcctccttccggtggccagggcaactgatttttcttgatacctcattgatgcgtgcacatatggtccaaataggttgcgcgcaccgcgcatggcaaagacgttgggggattggactttttttctttctttctatctcgaggcatatcatttcggcgggggtaggttttcgttttttctgcacttctcttacctttaatttccacaattgttcatgaggtcaccgatgattgttaaatcagatggatacattagggtcaaacaaacttatgacaaaattcaaataactcatttacatgatcccatggttccctcgtagggtttttcggcgcaatctttttagggtaaatttacagacatgtcttacttgtagtatgcatcttttaaagtgttcattgatatcgtatcgaggtcatcactaagttcaccaagctgctatttagtgtcctttcgcattccatcttcatgctcgaaagcattttcatctgtcagaaccatcaagcagtacggtccggcagagcctttaatgcctggaacgattgctcaaagtcggcaatgatatcgtcaatgtactctgtgccaaccgaaatgcggattccatcctccttgacaccggagtcacgacgctcctgctccgtgagctgctcatgggtggtggaccaggggtggatggccagggtcttagaatcgccgacactgcgatgtgttagtaaaagcattcaaaggagagcgaataagaatgaaccatacttggcaaggttcgagatcaacttgaagttgtcaacgacctgagcaccagcggcagcgccacccttgatgcccacagacagcacaccaccaaagccgcggggcaggtacttctttgcgagctcgtgactagggtggtcctccagaccgaggtatgacacccagctgacattctcgttctcccgcaaccatttagccagggcgagtgcgttggttgcgtgtcgctcgcatcgcagactcagagtctctatgccgagtatcaactgctgggcaccgaaggggttcagggtggagccgaggtcgcgcaggatctcaacgcgcactcggatagcatacgcaagcgagccgaatgtctcccagaacttcaacccgtggtaaccctcggatggctcgacgaattgggggaaccgggtagcgttcttgccccaatcaaactttccactgtcaatcacaactccagcaatggtggtaccatggccaccaatccacttagtagcactgtgcacgacaatatcggcaccgtggtcaattgggcgaacaaagtagccacctgcaccgaaggtgttatcgacctaaagtaaaaatcataagctttgtatcctcgcacgcttctcaaacaagcaacataccacaagcgggacacccttctcgtgtgcgaccttcgcaatggcctcaaagtccggaacattgtagcgggggttaccaatagactcaacgtagacagccttggtgcggtcatcaatggccgcagcaatatcctcaggattgtcaccctgaacaaacttggtattaattcccaggcgcgggagcataaccttgaactggttgtacgtgccgccatacaagttactcgtggagacgatattgtctcctgcttgggcgagggccgagatggccatgaattgggctgcctggccggaggaggcagcaacggcggcaacaccaccttctagagctgcaagtcgcttctcaaagacatcgactgttgggttcatgattcggctatagatattgccgaactctttgaggccgaacagcctcgcgccgtgggccgagtcattgaacacgtaagagctagtcgcatagattggaacagcgcgtgagtttgtggctaaatcaggttcgtgacttgagctttaggttagatttgtctttgaagtgaaattggacacttacccagcatgaagctgcagggtgtcgaagtggagattctcggacatggttcaagatatcagaatgaagtcgaggcaagagaatgtccactagttcagatttttcacactctaaggattgaactgaagacagagaaactaaagaagatcaagtggaaaaataaaaaagggacgatcttaagatggcggggagcaaatggtggggtgcagatggcgtgattgggggtttatactccgggcatgttcctgcatttgatgatacatgtatgttaggtatgtgttagctagtcttgcttcctttgagcctctttaggcaagagagactacattgaaatcgaatatcttaggcttttctgtctacgaggtatatacaacagtgaggattcgctggtgtagcccgggtgaagcccattctgctgatcaagaaagaagagagaagccatctaaaacagccgatcacacgcgggaaaagactagataaagaccaattctttcagcttgcccttgtcgaggaactcattgatcctccttctgtcaggcgaaatcattatctcagatgcctcttgactttgccagatctccggggtgtaatataagcttggcaaatcttcatagactagatggagattgctccggatgaatgtttcaaatctgaccttctccatggatgtctccttgtcggctatcttcctggaagcctcggcacgagctatagcagtcaagaaaatctggatccagaacatcttatgtgtgaccgaatcgacccgaggacctgtcattttctctgcttgctccaatgcagtttttcctggcaagccgttctctgatcccattataagcttcctatataaatatagtagcatgtgcgaatgggtggatatactgggagaatccgccattggggatccagccagtgcctgtacatcctggatgacccagattgcttggaaagaaaggcactcgatggttggcaacttagggctattctgtagcagagcagtctccatctgcttgaaaagagcggcttgcttttgggattgggatgagatggtgatgacatttggtaccggcttgaggtctggttggacaaatgccatacgtgcggaaatgctattccagaccttctccgagtaatagcgtttccaagtagacgagttcagttcgaaaagcgcgctgagagtagcggagctaatgcgtgatgcagggacgtcaactatcgacctttcactcgttgaactccctggagctgcctcaagtgactggatagcagcatgaactacttgaatccagaaataggcctgtgtttcggaataggggggaacggatgagttggtcgttctaaggcggattgtcgtcatctttagcgaatcaagtgcttccttgaccacttgaccgcgccgagcgcctgaagtgagagtgtattgaacaactgcaaaggcgtattggaggagccggtccgggttactgatttgtccgggaagagaatcatgatttagacttgatagtccaggcacgggtcgcaggtcaggaagtgaccatgactcccgtgccgtttcagaaaacatatgctccttgctgtagtatagtctccaaaggccggtgttcattaatgacggcgtgtagaggaggacttgctgaaagtcattccaggatgggaatttttctttccctgtgtggagtttgtgtttcaaaatagcattctgcagttgtaggagccagaatattgtcattgttctttgatatttcagcacaagtcctttgaaaggatcatccgatttaggtctcttaccgatgctctgtatttcgaaaaagatcgggtttcatcgttctcagtctccttatatgcccaaggaaagtttccgccatatcgaacacattcttcccttccttgattgactccaaagtaataatgaagcctgacttgaggtgactgcgatggtcccaccctgtcaaatcagcactcaaaaacgaatgccaaaattgccgaggatccatattatcttcggagccttctttttcaattcgtactttgagattgtgatcatctgatgcctcctctttctgcgactgctttggaacagggtgcttagagatctgttgctgatggtgatcttgttctatgctagtgatgaaggcatgtagatcctccataacctgcttgaccccttccccagtcttgccactcacaggataatcaatgactttgcatttgacagaatcgtcgaatatttcctttaatcttttgccatataccaagcgtagatgatcaatatcttgtgcagacagagagtcttgagagtcttgcttgttaaagataatccataaacttctataacccaccttgagcatttctttgccaatgatagagaggagatcgaggctttcttgtgtgtattcctcatccatggtacagtcatggaagaacaagacggatgtgtctggggaacaaacgtatgctaaccaatttgggtaccgaaagcatcccactagatgcgtttagaacaaggataagttgtccagaaaggagaattgacgtacttccagtatcccagatcatatatgggtgacatttatactcaaaggattcgaggtagtggcctatggttggaaatgcatcgactgcttgaccgagaataagttgggaaagaaaggtagtcttcccagatgccgcctctccaagaataagaacttgccgttcagaatacccacggagccatttaataacgctttgcagtgccatgggagccacgtcaagagtataaaatgagaaagacagagtatcgactgctgatcagagcaacctcggctccagggcttgagctctggaggtggatgagtcagtgtactgaaatgcgctagtccggttatggcaactcttagggcatgtactacttttcacatgccaatgataacactatcctaagacaagccgtgtgcttctgtgacatagtcgatgttgaatgccgatatctgaatcagactcgatacagaagcaagttcgtcgtctgaatacacccgctcttttcaccattccagatttcagatatgtttcctagcgcaaagtgaactgagctctaacccgaacataaatgccataccaacatcgaaacaaaaatcttccgcatttcccacggtctattttagtttattaagctttactccatccatctccatttgactccattttgctccatttgactccatacatcctcaaatggattcgaaaaaagtggacccgcgcgggattgaaccacgaatctccgaggaaccgcatgaaaactcccgggggatgtttacataagctcggcgccttaaccattgggccacaggtcctatgtcgcaaacccgtcgtggattgtctacattataagatgacttcctgtatccccaacctctcccaaccccaagcccgtacaatatacagagtatcagccttggttattcacttggtttgtatgtacaagtgccagggccaccatcgcccccaatcagactgatctaatccaatgaatgatgaatgcgataaatgcgacttatggacaccacttgcattattctggagagcaaagtaaagtgaaaatcggtttatcggagtgggtcacgtgtgtggcttcagccctaccgctctacatgcaaagactacaacatcaagggcaccttgctacttgctgtatgatcactttttcgggttcttggtgtatattgcagccttgtaatatacagagtgtgataaatggttctctcgatccatacactccgatatcaaagggccaagggtacatctgtcttcatctacaacgatctgtagaaatgtcgacttgatactcttcatcatgcctggttcaattaattattgtctctggtgtgagttcaaagctaggatatgtgttgcaaatgcagcgcagatgcaggaaaccaaatagatcagccatacctatagaaacaccccctttacttgagatgcagatctctgtccaggtgagaataggttacgttctggccatctacgggatgttttggtgtcatgcaaccatatgcagtcatttaaccgatctgacctatggcgttaaatttagtctataaggggaatagttcgctgtattcttttaccatgtcatattagccgtatcattctttcgatgaaccaatcatttcaatgaacttctgtttttctttattctcgcctctcgtccggggccccgcatcccagatttcatggggaatctccagaagtcacataatccccatatgtattggccaattgaaatagaatttgaactattcccagccttctctcccaagccagttactcgtaagcgccacaaccttcctagtcagccagttctcgacgccctcggcggtggctaaccttttctagtcgcagctaagcctctagcccgtctcggcgttggccactctcggataaattgctgtagcagtcgtactttcgggaaacgggtaataccccggcgggacaggttgcatccctatccatacgatcgttgacttgtttgacaaactctcagatggcagaattagtccacgtatcacgcgcatgccatgcagctctgcaaacgcgcacaagcggtaagatataaaagaccccagtttgtcctttttgcgtttcccgagcttttgattctcattccctttttgacctggaaataacgactatttccgaaaatgtcatccgacaaaagtgatgacttgtacgagaaggctgccgttgagcaatctgaggtcttggtcaacaaggacctcatgaaggatgccttcgatggagagaaccgcgaacatgagatgacaacgtgggcggccatgaagagccacccctgggcttgcttgtgggcattcaccatgtgcttcactattgtgagtttatgctacttttctatttcccccgcatttcaggttcatctcccccggatctcgagatcatatcagctgatccatataatatctaccatcaggtgatggaatcgttcgatatgttcctaaatggtaactttgtcgcgcttcccgcgttcaaagaacggtatggcgtcgacgtcgagggacacggttacactatcccgaccaaatggcaaagctccctcttccaggccggtcaatgtggcgctttcgtcggtgttttcttggccggtcctatcaccaatcggtttggctaccgcttgactaccatcttcgccctgatccttatgaacgccaccatttttatttccttctttgtgagtaagccaaccccaacggttgaacttattctctaactgcacctaggccgactcactcactgtccttgtggtcggccaggctttagaaggtatcccttggggattctttattgcaaactcccccgcctatgccagtgagattgttcctctctccctgagaggtgcctgcacggctactcttcaaatgagttggtccatcggttcaatcattgtcgccgccgcaacctacggctacaataagcgcaacgatgagtgggcttggcgagtgcctcttgccttacaatggatctttcctgtgggtcctctcctttgaggtatgtttttacatactgactccttctagactcctctcttgatcctcctcttcttcgcccccgaatcgccttggtggctgattcgccgtggacgcaaagcagaggcccttcgttccatcgagcgtcttggtagtgaatctcatgagcaagctcagcagtcgcttgctatgatagaacgaaccgttgagatcgaagctcaaatgggcggtaccccaactcttctcgaccttctcaagggcaccgatctaagacgaactatcatcacctgtttaatctacgcgtcgcagaactttgccggtaacttgattgccaaccaggcaacttacttcttcgagcgtgagtagttcctcctctccttctaaattctcagccgcaatagatgactgactccctacttagaggccggcatgggctccgaccgttcattccaactcaatctgatcaactcgtgtcttcaattagttgccaacataatctctttacctctggcctcttcatttggtcgccgaaccatctatctctggggcacagtcaccaacatgatcctactcctgctcctcggcgtctgcgcctctatcagccagaatacagcgaccaactacgcccaggccgttctaggaatcatcatctccttcgtctttgccggtagtctcggacccatttcatacaccatcattgccgagagctcctccgtacgtcttcgcgccttgagcaccggtgtcggtcgtgccgcgtactatttcgccgagatccccatgatctatcttgcctcgcaaatgcttaaccctactgggtggaatctcgctggaaagtgtggctacgtctggggaggtaccgcttgtgtctgctttgtgtcggcctacttcttccttcctgaactcaagggccgctcttaccgtgaaagtgatatcttgttcaatcgcaagattcctgcccggaagttcaaatcgaccgttattgatgtcagggagaacgagtaaggcatgacgatatgaaggaatgagatatgcttttgtgcttctgaagcgtggtaaatcagaagaaaagcttttatttaaagaccattaagtcctctagtaaacgttgcaaccattccaccgagtagatgtgcgcaacagatacattcgcttcactctaccaatacagtggccattggtacagaggacactagcaaatctaccactaggaaggcttcatcgtaatataatatacgcagttgatgctaatagacgaaataggaagcataggtttaacactcaattcggttgtccagcgcccttatttgacatttttttaatagccatgagctagaaaattgaagtaatgctcttctacttatgagctatgtagattcttattcagtttggcgggtacctatgtaccaaggcggttaggtataaaagttcgtaacttttataggaccacatttatagttaggatggtgatattatatgtatgtcaattagaagattttattgcctataaggtggcaaatactttaaatgaacgatcacatctcggtacatttgggaacggagaaaatctagagaaatatagagcagggttacacgtggatgagctagttgcccatatgcttagctctagtcagtgaataagatacgaggtctgagcagtacagcggaaaggaaaatcgaatgaaatagcagaggatcaagtacctgtgtaggtagaaatagtaagaatagtacaaccaaaaatgccacccttgtagttaaaacaccgacgctatcaaatcacaaaaagaaaaaagaacatacatcacaacacaattgcgcgaaaactccacctgcagataggaaatctttcaccgtcccatagattgcgtcactataggataatagaagatctggtcatattggtaatacatcatcacggggaactcttcgtctcagaactcttcatttcagaatttttcgtttcagagttggcaacatcgtttggagccttttcagattgaacgattgaagctgacgttgagctctccttgtagggcttgtccgacagcttggcctcggcggcggccaacttggcattggttgcgtccaaagtcgtcttcagggccttgatgtaatcaatggccatctccacggcggtagccttgctgatagcctggttggccttttctttctccttttccttctcgttggccttgcccccggattctgcggcatccttcgcgctgcgtgcatcgatgaattcctgcggaataagaagctcaatctccttaagcgcattgttgattcgattccggcgcccctgctctgcgagcttgtgattcgtgcgcttggagctcaggttctctgccagggcctctggatagcttacacccgatggcagagtgccgtcgagaatgtgttgatagttggacttcgatgcaagataaagcgcatcttgtgacatgcctataatatagtcagtataacagggatgaaattcaattctggtcaaaactcaccctcgttgcctttcataagcggctgaatgctgggactaatcttgggccgcaactgtgggctggcctgagtggaactcaaactaggtcgtttccgattagacgcagccctggtatctgatttccgagggaccggaccactaggagacggcattgcagttgtgcgtggactgggagcaagagaggcactgagaggcttatcgtgcgccgaaggactcaagaaaggtgttccattcgtggggattgacggagtccgtacagcggtgtcgatgcggttgggtctcggacgcagctgcgaaggagcggccgcctctggaagtgatatatcttccattatatcatctgggaactcaggctctgcaagctgcgcttggccgcggaattggcctgcggggtcttgcgaatgctgattccgctgaatgcgcatcaaaagcgcaggggtggcggcagtaccgggagaagagctttgaacatggggagcaattgcaggagacatccgagggggaggaagagcgggagggggcatcatcggttctgacaatggctcaggggataccgagtcctggccggaaccttcattgctgctgagctggagtgagcggatgtcctgattttgcggctttgtcgagttcatctcctgggtaaggctattgtagaactcctccgaattggtagccaaggtgctgcgtttgcgctgcgcccgaataatgggtgattgcttgaccttccgtgtgttattgagccgattagcggttgatggccgctgacgagtgttgggtttccgaataatgctaggagaaggtggagccgagcttccagggagagggttcacttccgtagttgtgggaacgaagcccatgtccgaaacctgtcttgcgtggtactggtaactgctggattcggagttttgggcctcgagggcgggagaggtgagaggtgtaaagtattcgccggggattgtgtattcggggagtcggaattggttctccaggggcgtcatagccggtgagataagaggagtgtaaagggccttgattgttagccagcaaattcattctcggatttgtgtcaagactaacctgttcctcgttcatgcgtgaatatccgtcgtacatatccgtttcgtccacgcgatgggggtatcgggcggtattgccatgcatctcgatactgttcggggtgggagggatcatgttgtggccctgcatataatgttggtgggtaggcggttgcgacataggcgatggttgctgcgcgcaaaagcctggcgtcatatggggagtcgagtaaggcattgagttgccgtggttcgtgtgcgactgtgcgttatcgttgaaatccatgaggccctccatctggcccgagtattgcatgccatgcgatcgtaggtgagccatatccgagtctgggccggtggaagttggtagggaatgggaatgttgcatattccctgttcctggtccgtgctcgatttcggggaaaggtatgttgaaatcaaacaggttggaaaattcttcctcaccaggcgcactgatgagattattctcatgcagctgctctggccacgacatggctggttgttccattttttgtaaaaggagatatccagttgggccaattaggccgagagagaactgggtgttgaagtagccacctgcagcatacagagaagatccgagaaaggaagaacccgggcaatcgggggggggggaaattgaaaagaagagaagagatgaagtggagaatcaaaaaccttcggggcggagacggtcctccgtggtcggcaacggcaccttgccactgtgttggatgttagacgaagtacgagcatacgcctttttaatcttattcctgcgctagatgcgcgtgtgcttatagtgcatgctgaaagaacctggtaaaaaagtactagcttactatggagtgctcccataggtatgttctccgtacttcgtatagtccaaatctctttttgtcccgtttaacccacagtggggatacggaatacggacaagcttccggggatatatgcatgagatttatatttctaccaaagtaagaaggagtagtaagtagtactaggtaacagttatgtagtcaactatgactcgaacatatcaacttcgagggtttcccaggtgcaggtggaatataaatccacatgcatggatacctcaggcagagattgaggggtttatcacctcgtgatatcggcttacctgagcaacaggcatgacatgatcactttagacttccccctggagagcttcgtaacctatttaacttcgcttgttcggtaatctttcctgtgagatatgccctcatgatgagacctactccagacctcccattctctcgcaaaccctccgaccatcccccatccccatccctcgatccccgcactgcaacccctgcgaccttcttcttatcgcggaatccgcatgtcgcggattgggattccagtatatcgatagatagccccgaggatgtcaaagagaatatgtatggagtacaaagcctagatacctctctgtcccaatcagaattcccatcctggccccgcaatcactccgcagaggacagcctgaagcaggcaaccgacgatttagaatcgcacctcgcacaatgccggtcaacgttaaagccgttaaactcagacaccggggaatcatctgaacatgcatcacccgctcatacagtgtctcggcccgtgaccccacttacgttgggcatccccgatgacccatcgtcgctgcccagcagccctaaatcaatatccaaccagtctttgcggccactcgacgatatctctatcacagatgaaatcaatagtcaggctatcggatctggagatgaagacgaaatgccccatgagtctccttttttgggcccaggtggggcggcctcccagcttatcatgccaagcatcaaaatgcctagtcggcgaccgttcactgagcgagggaaagctatgggacgattcaaggtccttttagctggtgctcctggtaggtttcaacagttctagagaaattacacgggctaattgtctcgaaaattaggttctggtaagacttcattgattaagtctatcgttcagacatgcgacgatatcgttcatgtcgacgccatcccacagatgacctcttcgggacgccgtagatcttgccggcctcgatctcgggggagatcgactgctactatggaaatttatgctagcaccaaaccttatccttcatggtggtcggatctggaagattcgcgcgtccttcagcggcggaaaagcatgggggaaattgtgctagagaggaatctctgtttcgtggacacgcctgcgacaaatctaagccgagcaggtcaaagtgacgctatcggggagtatatgagacaacaattcttccgtgccaccactgcgctcagtgggtctagtgttgatttccaaaatctcctagccgggaatggtggatcccaggtggatgccatcttatatttgatttctactggtaggctttttctattctatctccgagggatacatcccaaattaattcctggtcgctaaccttctacgtgcagataccctctcaacagacgtggaatgcatccgcaagctctgcgagctaagcaatgtgatcccaatagtatccaaagcagacaccctcaccccgactcaagtcactcacttgaaagtccgcttccacgaacaagctcgcgaggccggaatcaaaccattcctattcggtgatctgccgaacggtcaagatgggctcgaatcccaacccccttatgccgtctcttccgagaaatcagtcgatgccgaaacaatggatgcaagcactctaatgagtccagactacgttcaaccactcataccctccgaactagacgccctagtcacaaaaatgtttgatcgcgacaatctagcctggatgcgccattctgccgcaaagaaacttctccagcaacgcaccgactcgtattcgctcccgtcctcaatgccgttacctagtgcgcagctgggtcctactgcaaatgggtccgaatatgcatatagcagctggcgttccgtcactggaacctctatgtcgcccggctctccccccggctatgccatggcccgcatcgcagactacacccgacatgaggagcgtatggcgcaggtccgcctcgcacaatgggcgacagacctgcagcgcagcctgcagaacgagcgcaatcgatacacctcgatagcccgcggcgagcgcgctatatggctcaccgagcggctaggcgagtgtgttatcgacggctcgttggtgcctctttcacagacgcctggcttctgtggcttgcatggcccgatcgacgagaagagccctggtgggttccaggtcatgcgctcacatgccggttccggggcggcgtatcgcttcgcgaagttcagtccgcatgacccgctcggcgtggttggctggattgacgaactcggacatcggagctggatgcttgttcagattgtcgggagtgtaggggttgttggtggtctggcgctctggcttgcgcgcacttggggatttccaacgcgcagtctttcggatttccgtgtcgattattggtgtggtactatggaacggtaggtcgatgagataatgagggtatgagtatgtgatattggctttatagagttagggtctcctagtttgttgtctgaagcgttcctactggatgggtttttgtttctctgctctttgtcttcggaaatcattgctatcatcttccttcggcgtcttatggccggtgtcttacggctctgggactattctccttgcggttcagggtcacgtagcatattaagatagggattacttcgcatggaagtgataaatgtgatttttatttgatttttattctgtgtgattcatcttaatccttttaccccgtctatcattgagattggacagtgtctgaactatatcgacttcgttttcgccatttccattcatagatccaaagatgctgcgatcttccatagcttggtaagatggccgagttggtccaaggcgcacggttcaggttaacctgatcccgatggtatacaactgtctccgtgtctcgaaaggggcgtgggttcaaatcccactcttatcatatctttttgcttttttgttgctagcattatcttttgcttcatagaataataacaaggatactagtctaatagtctggcagcgccttgtcatgtcgttttggtagtcttttcagcagtctccgtaaatttatagtattttctcgcccttcttagatagacggcggaaaaagacgcttaatttgtgcagacgacctccgtatgtatgacatttgattacgaacttagtaaaaaggttgttgttgcttttttttcatttaccttgctactagtgaagtatgtcgtcagaataggatgtagccaatgaacctctatctatatcaatcaaatcgacaattggcctgccaacctccagaactcacattgttgcatcgatttttttgtaaataatgctaggaatgtgtgatgtctatgtgttgcagttagatagcataggcgtgagcaagattgatataatcttagcctcggtcattactcttctgcatgaggtatactacaaacctgcatagatcttcgtcttaattaattctatgggatgataagatcaaaatccgggatattgctcgggaaaatggaagagcagggtccaacgaaagagtatgaagaagcaatggtcaatccctgcatgagattatatctcaccccaagattatggctatcacgagccaaggaaatccataggtctactggagagaatggaaatagaggataaggtacaattgtattacagtcaactacacccttaaaagaacaaaagagatatgggcaatgaatctaggcacaagtggtcacatcaaatccaaaacgaagggaacatagttttccctctctacggtgtaatgtatacagggattttaaacggtcagaccgaggtcctcggcgaagggcagctggtgaatatcacccacgctgacgagggtggccttgccagtcaggaaggtgttggcgacctacgggtaactgttagcatcatgacatcaacaatgtggatagagaaagaacatacctccttgacctgctgctcggagaccttctcgagagcctgagcaatctcgttgatctggtagggcttgttgccgtggatgaggccggaaccggtagcctcaagaccggtctcgagggtctggacggactccagagcgcggaacttggcgagagcaatagccttcttgatgtcctcggaggcgacctcaccggcggcggccttcttgagggcatcgacaacgttcttgctggcggcgccgacctgatcggcctggccggacagggtgacagtgaaaagaccggcatcggagtaggcgttgttcttggtagagacgtggagctggttgaagcccttggtggcctgcgacagaagggagaagccgggggtccacttgatagtggactcaccgcccagaagagcagcgagaacggaagcctcggccttgtagcctgcggtgccgaaagcgctggaaccggggaaggcgatcacaacagcattgccgatcttggaggcaatgcgctgctcaccaccgtagtacttggaggcgacggagggcagaacgttgtacttgctggaggcgtggctggcaggggtgtccttgaagaattgaccaacccacttagagacctcagcggagttggggccgctggcgacaagagcaatgttggacttggcgtaggcgctctgggcgaactctgcgagagcatcgccggagacgtacttctcgtaaggagaggtctgggagggggtgatagaggcgcccagaccgcggtggaaagcaacaccgtgggcggcatcgacagcaacggtctccgggttggagtggacggcctgctgcttgtacttgatgagcttgctgacaacctcgtgcaattcgtggtctaattttatggaaggggcccgagtcagcaaaagatgctcatataattgcgatccaccacgtcaaaagggactaactcacctgcaaacttggtctgggtagcaacctcggccagcaactctgtgaagtagggcagatccttggagaggaacttggtccggaggacaatgttttcgcgcgagtgtgtcgacgagatttcaccgcctagcagctcggtctcccgggtgatccgcagtgcagaccgcttgagggtagtctattgaggaattgaatgattagtatcaccaaatatacctgagatgaatcaattgatgccataagaccgaccttgaaagcgaatcgatcgagagcatcggagaacccagggaagggctggtaacgggagccagccttagcaaccagagccagggtgccagtagggccctgaacttcacggttggcgacctttacgccggaggcttcggagacatcgtactggaaggccgggttgacagcggaggccatggaccgacggccggcggccaaagcacgcggcgcatttcggctgagggaagatcgcgacagcatcgtcgcctgtgccgagaatctgtgagagaagaagaagaaatataaacccgaattgggtttgtaaagaggcgcaaatgaggcgggggaggaggtgggatgcggagagagcaagagagaagaggcagtttgggaggtcacgaaaagcttcaagatcccgactcgtcactccaaccaatcagcggtcaagtaatcaaaagcgcggacggaaccggagttacttttattgcgagtagtagttatataggacttttctattgtctttgtattgattgttatagtctaattgagcgtttttaaattcaaaatctctattctaaagaaagtcctgagtatctctattgtttcccccattgtctctgaacaacgttgctgaatgaggcatttgaatcagctgattggccatatcacgtgaatataccgataagcaaaaataagaacaaaagaacaattgcatctcatcggcggtggatttttggacctgcagatgtctgctagcttgtaaatcttcatgagcattcggtgacccttaggtgccccctctcgaggtttggtggtgaatcttctcatatctttagcccaccatgatgatgtctcaggtatgcgactgtcccgctaacctcgagagagctacttactgacatgaacgtagtgctctaccgagctttgtatgctcttgatcgaagacaattttggagagctctttgccgtgagtcatcttgtgcacacgctcgggctatcatggttctctgcgacagcggggaaggaaccgggctaactagtcaacttttcgcagcgcatctttaccgtccttcaacgttatgaaagactgactctccctcggttgagattctacgctcgcctgacagatcgccaattgcaccatggtctctccgctatgatccagcaccacctgatataccacttcacttccctcgatgatggcaatacctactacgaagctaatccacaagccgcatactccctcgtgcgatctggaaagattctccagcttgttgaaactcgattgggagaatacgcggctcaggtgttggaagcaatcatgagtctcggtcactcctcgatcgcccacctcgagacgcttccggagcttcaatccaagaggcagcgcattccgaatggggttaatcagggtgaaaatacggtcgaaaatacggtcgaagatacggtcgatgggaacggggaaaaggaagaagattcagctgctcctaacggcaatcatgttgtcagggaaaaaccggtgcaccttcatcccaccttgaagagtctcgcctctcacggatacatccatcgtcttcgagaggcacatttccaaagtccgaacgacaactggatagatgcttcccgaatcatcgcgtcaagaccagatgtcaaacaaatgaaaggcaaacagcaagcaacggagattgaggagaaggcgaaggacttggtcaaggaaagaactgaaggagatctgagcaggggcctaatatacaacggcctccctcaaggcgccaaaagaaaacgcgatcatggcaactcggagtccaataagcaggcgcctaatggcactaacggtgtcaacggggaccatgtagaggacgagggggaagaggataatgattggtcggaagatgaagatggcgttgattcaatcccaatggatgtaagttttcctttttccttgccacggcttcgggtcaactaataaccattaccagtctaaccttatcgttcgggtgaactacgagaaactcgacgtggcgcttcgaaacacgcggttcctcgaccttgctaagcaagatgcaccttccgcctcagttgagatttatgactgtctgcttcgtcgcattgaataccaaacagcccgctgccgagactcttatgaaatccctcgtgaaggagaagaaggcgagcaatattctgctccaattcaactgagctcaatcgtcgaagacgttgacccgaatctggatcttacgggatgtattggcccgatggagccctcaacggtgttaaaccgaggcggcaagcgaccattggatgatgagacgaatggcgtgaatggtgacgagcatgaagatgaaccgagcgggcagaaccgcgcctatggaattgaccagcaccttagtattctctcacaacctcccttgaaccttaccacaaaacacgtcatctccgggctcccaacgtggcgagttgcattccgaggcctggcccgcaagcttcgccatttagaactggagcgcatgattgaatcacggtatggagatgtggcactgcgggtggtccgcgtcctgcatgccaagggtaagcttgacgagaaacggctccaagaaatcagtctcctaccctttaaagatttgcgccagacgcttgctagcatgcaaactggagggtttgtggacttgcaggaagtgccgcgtgacgcacagcgccagccttccaagacaatctacctgtggtactacgatccagatcgagtgtgcagcagtatgctggaggatacgtacaaagccatgtcacggtgcctgcagcgcatcaaattcgaacgtggccgcgagagagattttctcgagaagacagaacgaaccgacgtcaagggccacgaggaagaattcctctcggaggcggaattagaacatcttcgcaactggaaggccaaggaagccttgctgctggcggaggtatctcgattagatgacatggttgctgttttccgtgattattgatttgctatgtttatatcatggaggctgggaagtaattggggttgcataaatctgtacaggcgaatgagcgacgaattgatacaaatgacatttccatgctcgttctgcgagtctatacctcagacatatgttggagatatgtagccatgtttccaaggtcgctccttccaggcgtagataaggtactccgttgccttagtaagtagcatacgctcaccgccacaaaaggaatgaatacatatctcagatgtgagaaacaggctttgtctctttagctttgtctctttagctttgtctctttagctttgtctctatgtcagtgcaggatctagaattcagcattcgtccaactctttgctgataagaagctatgatgaccttcaaattacccatctctggtatttttcatagggctcctttgtgggtattttctttttattttatttccttgccttcactcttaatatgattgatagatatgataaacagccttggaagtgcacgttctatatgttataaaataatccagacattttgtataacttggggccctgttccacgaagatcggcagccccgcgtcataggcctttcacatgcaccatttagccaagaatatacgagactagcgttgaatactttactacttcgtataggcagcaaagaaagggaaaaatagcgcaatgtattaatagagaccaggcggcatagtagtgtctaaacggtaatcaaaggacatcagagaggcgcattaggcagtataaattcaaaacaaaccggcaaataaacagtcaaagaatgcgggagaaaccaaaagtggtacctattcaaggcagaaataaacccctacgtcagccctattggtatcaaaatcgccaagtctgtaaatattaatgacgctggcgcgacgccggtggctgcccgatccctgcgccttgttataccttgccataccttgcctggggttcctacaaaaagggtttttttctgacacaaatccacagataaatttatttcacattcatattcacattcacaacaacataacatcctatcgaagatggccctcccgtggatataccccgtccgaatcgcccaagcactcttcggcgtgatcgtgatcggtttgacaggatatggtccgttgcttcagagcaaattcttgaaaatccatgacaactgacaagtctctagtggtttcattattctacaatggatggtcatactcggataccgtcaacttcctcctcttcctcggttgctggactgcctttgtagcagtgccctacctcgtcgttgcaccgatatggttccctcgccttgcacaccgctttgtgattccggctgttgaagtgatcaccatgatcttctggtttgctgggtttatcgctctgggagcgatattgcctgcgccgaggtggtgtcatggcagtgcatgcagctcgctccaggcagcaacggtatttggggctattgaatggtgcgtgtcttctacttttggttggcgttatatgatggtacatattgacagagagctaacaatgatttgtgtggcatatagggtactttttgcggtcaccagctatttcagtattgtcgatcttatgcaccaccgcggggcagaagcgaaaacacatacgaatgtgcagatgggagtctgaagtgtttatttgacttgatttggatatgataccctttgaatagcgacctttatgtttatcttatgaatttcaaccggatcataggtctaacatgtagtgtcatttttatgactaactagtagtagctccaaggttaatctccgcaaacggcaacccggccccgccaagcccgctgccaagcatgtggctacatgattagttgccacagtagattcttatttcaggattgacaagaggaatatagaggattaactagttggatatatcgcgtggaataagatgtacatgtagtctattctatgtacgtatccttgaatgtggccatttatctcattgatctgcaatgcatgataagaggcctcggaacattcgggacctggggatgccaaagacaaccgtggatctttcaaagcctcgaattatcagcatcgtgtgctttgtaatgaagccgagttgcaagagccgataagctttttatgtaactaggtacagttcgtggtccacgggtacatactccgtagttaactaactatcgcttccaaggttacgtacaacataagccgtcttaccaccccacggtacgccactcatcccacccgtgcccaggtgggaaccagacagaaatttctcagacagaaattgtaggattttaggtatctttacatggtatacctatacaaaaggtacataacttgagatatacgtaataatagatatcgtataactaatagatatagtatcaaggaggcctgttctatttggtattgtctctaaatggcagctcgttgatggctatatacatttcttagttatgtatggtattttatattctccatataagatatctagatttattattagccaatcaactaaacgagaaatttatcattcttcctctaactagccagagggagaaaataaggtagtattaggtatacgtaccttatatgagtgggctagttatacaaaagataactaattctgacaatttctgtttggtgagaaaaattttgtttagtgggacagacccatacatttccaggtatgggagcggtaagatcaaaagatgttcggacgtagtactagtctcgtgtgttgctccaccgaggaaaaagcctgtcttcggacttcttttgcctcaatcgagtggatacttgttgcagtctctcagatcctttctttcctctctttatcccatcttcaagccaccccctcttgccctagcaaacatggctgacaagtcagagggaaagatgagcggtgaattgcctgtgcaagtccaagcacagagcattgcctatgatatcgactatgagaagttcggtgcccagcgtgaggcgaacccgctgccggatctcaagcggcagttgaagagcagacatttacagatgattgccattggtgagttatgatgagctatatatcatcgatcaggatcttcaggctaatgctcttcgaaggcggcacaataggtaccggtttattcattggtagcggcaccgccattgctcacggaggccccgtgggcgctctcatcgcttatatcttcgttggatcgatcgtgtactcggtcatgaccgccctcggagagatcgcaacatatatcccgattcctggcgccttcacctcgtacgctgctcgcctgattgaccctagtttgggctttgctatgggttggatctattggttctcatgggcatcaacatttgcgctggaattaactgcaaccggtttgattatccagttctgggacagcaacattcccatcgctatcttcatcggcgtgttctgggtcgtcattatcgttttcaacatgatgcctgtggccttttatggtgaaatcgagttttggttcgcgagtatcaaggtcattaccgtgattggcttcatgatcttcgcgatttgtatgaatgccggtgtcggtaaagaagggtatctcggtttccgatactgggtgcacccaggtccattcgtcccctacttgatgtcccctacttgattgaaggaaacgattcgttggccaagtttgttggattctggtcgacgcttattcaggccggattttcctaccagggaaccgaactggttggtattgcggccggtgagaccgagaaccctcgcaagaccgtcccatctgctattcgcaaaaccttcttccgtatcgtcttcttcttcatcctgacaatcttcttcctcggaattctcgtgccctctagcgaccccggtctattggctagtcagggagatggtgcttctgctcagaacgccaacgcttcgcccttcgtcattgccgccaaccgtgccggtgtcgcggctctccccagtatcatcaacgccgttcttctaaccgtggtactttcagcggccaactccaacgtctacagcgggagccgtattctggtgggtctggcccaggaaggtttcgcccctcattggttcaagattaccagcaagcacggtgtcccttactacagtgtgctcttcacggcggcctttggtctgctcggattcttgaacgtctccgatgcaggtagcacagtgttcacctggttactccagatctcgggtgtggctggtttcatcacctggtcttcactgaacgcctgccaccttgccttccaacgggcgcttaaggctcgtaacatctctcgggatatcctgccttacaaggccatctggcagccctggtactcgtggtatggtctgttcttcaattgtctgatcattctcacccagggattcactgcctttatcccgaacttccaagtcaaggatttcttcatcaactacctgagcttgattttgttcgtggtgctatatgcgggacacaggatcatttaccgacctccctttgtcaagcccattgaagctgacctggataccggtcgtaccactgctgataatgagacatgggagactatcgagccaaccacatggcaaggcaaggcatggaagtggatttgcgattaattagatactgctgatctgtatattagttttttctttgcatattgcatattgcatattgtataggtgttatctttttctttcttttttcaatgtttatattccaacaatatatctacatcttcatacattatacttatacaatataccatctcggtccatgtgaaaatcagtgcatgtgagttgtccagcaaattgggtggaatatgtaagcagctccactcgggtaggtacctgagatactatatgaggtaccactctgtggcaagtacccaaaaacagccgaggtcccttgttcggctcatgtctttcatgtcccaaaagagtcggttgctccgggtttgttgcgactccagttttctcccccacactctttgccccctttaatatccggatcactcgggcattccttcctttctctcttttcttactcacatagatatccggttcgtcggcctgttgttatcactcattctctcgctgaccacagatcgctatcccgctagacatgtttttctcacaacctacccatttggctaaggccgaggagctcaagcaagcaccccccaaaggcgtcgcttactctgtggctcttcccggcaccgaacagcctggccgcagtccggtataccgagcatggaatgcgcagaaggaacttttgacaacactggaccccgaggtacagaggcgcacgcgcgaatgttagaatatctttatactgactgattttaggtcaccacggcccatgatatattcgagtcgaccgccatccgccatcccaagaatgactgccttggttggcgtccgtataactccacgaccaagtcctttgatccataccagtggctcacttacgagactgtgcagaagagacgcgccgcattcggtgctggtatagtagagctgcaccacaagcacgactgccatcgccccggccagtatggtgtcggtctctggtcccagaaccggccagaatggcagatcactggtgagtttaggttgtgagggcgaagaattcaagatattggacgctaaattgaaatcatgtacagatctggcttgcgtttcgcaatctctttactccgtctcgatctatgatgtcctgtccgaagacgctaccgaatacattatcaaccactctgagctgagctgtgttgtcacctctctacctcatatcgcctctctgatcaagctcaagccttctctcccaactttgaagatcatcatcagtttggacccattggatggtggtgagcaggccggtcactcgaagcgtgccatcttcgagtctatggccgctggtctgggcctggcgatctatactatcgatcaggttgaggagctgggtttggcctcgaagcgcggttacaatcctccttctgcttcggacattgtgactatcaactacacctccggaaccactggtccccccaagggtgtcgttctgacgcacggcaatgcggtggccgccacgtcctgcggtctgatcactatcagccaagcccgaggtgatacgtcggcctcttatctgccgctggctcatatatatgctcgtctggcagagcacaccgctttctggggtgctgcacggattggttatttccacggaaacatcgcggagttggtcgacgatttgaagttgctgaagcccaccggtttcatgtctgttcctcgtctttacagtcgatttggtagcgcgatccgtgccgcgacagttgaacagcccgggttcaagggcgctctttcgcgacacatcattgcggccaaaaccgcgaacatgaagaatcccgatccttccaaggcgaccgtcaggcacgctctgtacgatcgcatctgggctaagaaggtgactgccgctcttggtctggagcgagccagatacatggtgtctggctccgcacctttggatccgaccctacacaacttcctacgtgttgccaccggtaccgacgtccttcagggttacggcttgaccgagtcctacgcttcagctaccgctcagccggtctacgatctgactgctggcaattgtggtagtctcgcaccctgcgtcgaggcatgtctggtctccctgccagacatggagtactccgtggacgacaagccgttcccccgtggtgagctcttgctgcgcggcaacaacatgttccgcgagtactacaagaacgaggaagagactcgcagtgccatcaccgaggatggctggttccgcactggtgatgtctgcacaatcgatgagaaaggccgcttcatcatcattgaccgccgcaagaacgtgctcaagctcgcccaaggcgagtacatctcccccgagcgtcttgagggtgttgttctttccgagctgggctacatcgcccaggcctatgtccacggcgatagcttgcagaccttcctagttggcatcttcggtgtcgcgcctgacctcttcgctccatatgccagcaaggttctgggcaggaccattgcgccaacggacttggaagcggtcaaggaatctctgaacgacgacaaggtccgccgtgctgtgctccgtgaccttgagcgcgtggctaagaagcacaagtttgctggctatgagaggatccgcaatgtctctctcaaggtggagccgttcaccgttgagaacaacttgctgaccccgacgtaagtttttttcttttttttttccgtcgccgtaatcctagcattgctaacattattttctcctttctatagtctcaagctcaagcgtccccctaccgtcaaggtataccgttctcttttggatcagctctacgagcaggccgtcgaggagcaatctgctcccaaggctaagctgtagtggctccggcacttatttttatgcattattgttttccatcgtgttctcactgtggcatttggcaattcttcgcgggctcggttcaagaactgtacatagaacctgtctgtacattgtagtatattgaacattctgatagagttttggtccgcgctaccctcctctggctgtaggctactagtactagtttgggccggtcttctagcttttcttttgggtcttccttgtgagagctctttcttcatatgctgcttttatactttcgtcttttgcacatccttttcttataggtcttgcacagggcgtactactctacgccacactatgtccaacaaaaagaaaccacagtccttacctctccactgacaccataaattatcataatgttagactagctaacagaaaagcaaaaaaatctatgtccatagcctgtaaaagaaacaaaaaaacaaaaagatatgataagagtgggatttgaacccacgcccctttcgagacacggagacagttgtataccatcgggatcaggttaacctgaaccgtgcgccttggaccaactcggccatcttaccaagctatggaagatcgcagcatctttggatctatgaatggaaatggcgaaaacgaagtcgatatagttcagacactgtccaatctcaatgatagacggggtaaaaggattaagatgaatcacacagaataaaaatcaaataaaaatcacatttatcacttccatgcgaagtaatccctatcttaatatgctacgtgaccctgaaccgcaaggagaatagtcccagagccgtaagacaccggccataagacgccgaaggaagatgatagcaatgatttccgaagacaaagagcagagaaacaaaaacccatccagtaggaacgcttcagacaacaaactaggagaccctaactctataaagccaatatcacatactcataccctcattatctgaaatgaaattgaaaaaaacaaaaagatatgataagagtgggatttgaacccacgcccctttcgagacacggagacagttgtataccatcgggatcaggttaacctgaaccgtgcgccttggaccaactcggccatcttaccaagttatggaagatcgcagcatctttggatctatgaaggaaatttacctcacgctatacaggccatcaatatgttgtcgggctgagcgttgatccttgggtttcgggatatgatagcgcccatatatcattattcaaggagcgataaaatacactaacttagtatttagttggccaggtaggtcatagtcaatttttctatatatagcatgttcatcctagagtacggagtatctgcagtgcctatatatagcttaagatctggtggggcctatagagagtcatcattctaacattctattctcacttcccccaccagcattacgcccaatcctcgtttaccttatatttcattttaccttcttggccttcgcttaaaacacagctggaataaatggccgaccactccgagcccgatatcgtcttgtacgatttggcctgtactaagcacgtcagcttttctcccgttgtctggcgcattcgcctcatgctcaactataagaacattccttacaagactattttcctcgagtttccggacattgaacccacgctaaaagaactgtgcgttacagattacccttgtgttttcatgctttccagcactgtttacacgcgaggaaacccccagctaaccccgaatcaccaagtggcctggttccagaaaagtccgcatcgggatccaaatacactgtccccgcaatccaacatgtgccaaccaatacatacattatggactcgctcccgatcgcgcagttcctagagtcgatttacccaaacccacccgtaccactaacatcagaacttggtcgggagatcgagaccaaggcacgcggtgtgcttggcaaggccatctactcgtcagtgatgccacgcgagatccgcatcttatcgccacgctcacaagagtatttccggcgcacgcgcgaagcctccctcgggcaccgtcttgaagatctccttgacgagggcaaagaagagcaggtctggagtgatgttagcgccgccatgggcgctgttggcgagctgatccggacaaacaaggcggacggaccgtttgtgctcggtgcgcggccaagctacactgatttcttcattgctggatcccttcagtctattagagtggttgatgaaggggtgtttcagaggatgatcgggtaccctggctatggggaggtttatgaggcatgtctgtcttacatgggaaagagggattgattgaatcacggtctagactactttcaatgtattgtcggtcgggtcaaatgtcggtcgccaaatctaggaggtacacacaaatatgaagtgttggtcaggcaatgccacgcttgctaatttaattatacaagtttgaaggaaaggctgtgactttgatgtgcatgtatagccttggatatatatatgttggtctgtcgatggtccaactgcatattaacaacggttaactgaaggatatattactcaaggatagtaaagcaagatacaattatagtgttgacttataccacctaaggagttgacaagtaaagcagtataatgaatagcagcatgtctggttctgaaagcctgatttagtcatggggtcaggatcttattagctatctaagattttaagaataaaaaaatctctttaatttataaagctatatactatttttaagtacctaaggctaccttctaccgctacttctaggatatttaaaactagataattttatatactaacttattttgcggagcgaagcgaagcaattaaaaaaaataaccctctccccttcctagggggggtcgaatggcccccggagggaacgcctcgaaaggagatcatgtgaccaggcgctctctctactgggtcgaaaaaaatagaaatccagtcggtgaaaaagtaatcgctgagaaacggcagaatagatccagctggcagaaaaaaaaacaatctatctaatcagagtatatactaatcctaatgcagttagacaatagtattatgcgatatctactctgtagttagtatatagctaggccttcgtatctttctctcagctataagaccctacctatttattattatggattctggactatactctcaatatcggtatatacgccctatatatatatttcacttacatacaaatcgagagatccaatcgagagcgggcgcgaaagtggtttaaagtagtggtatagaggaagaaaaacaaataatgtagtttgtcttagacgaaataaatcggaaaattttttttttttatttacactgtttacattgtttatttacatatggcggcatgaaaaaagagcagttagtcgtttcgttctgcacaactatctcgcggccgcaggccggcgagatccctcgtattctttaaaggtattaagtactatatagttctctaagtcttctaatctctcctatatctattctatatatcttnnnnnnnnnnnnnnnnnnnnnnnnnnnnnnnnnnnnnnnnnnnnnnnnnnnnnnnnnnnnnnnnnnnnnnnacctatttattttatttacactgtttacattgtttatttacatatggcggcatgaaaaaagagcagttagtcgtttcgttctgcacaactatctcgcggccgcaggccggcgagatccctcgtagaatgaggatctgccacgcacgaccctaaaatgtatcaaccgcccaattctacatcaaaacacgaaaaacaagtcaattgagccgagaaaagctttagattgagaaaaaaacaaaaaagtaatatgataagagtgggatttgaacccacgcctcttgcgagaccaggaaactattgctagttgtagagtcaaggtataccttaacctggcgccttagaccaactcggccatcttaccaattcatgaaaggtcgatgagattatggctatatgaccggaaacctgtttcagctatcctggagtaataaaacctggagtctatgaattgaagtcaaagtactggagattcgagggtaatatacaggatagaatgagcatcaggctagttctgtagtggacttcgatccgtgaagcgatgataatatgggctaaagcagggcctactgaaggtcataggcatcgctagccaccttgtcccgtcaaatatttgccaacacatccaaagatatccggacacatccaacaataaatttgcctgactattttgattcaatcacagcgagatgggagacaattggacttgtcttcgccctattgggaacagcattattccatacacctgaagatgacccggtcttcacacatcgcaacccgtggaaacttgcaaagagcaatctcagaaataccgcaaccgccattggaaatatttgttgcgaactttgcaatggtgttggaacgattagcgatccattttgctggctcatgacccagaactagttctcttgacttcgatgtttggcaacagcggtaatcaccctttaatagtacccactggaaaagaaacgaatgactgaaagtcggatagattatagggtctggcaaaagctcggcgatctatctaccattgtttacgcatttggtttgcatcaatccggtgaagacatcaaagaaaactttccgttcttcttggtggagatacgaaagcgagtcatggtgtgcgcatacgcaattgataaagagttagcgatctctttggggcgtcccccacggatatgctctcgatattgttgtattccgcttccgttagacataagttatgacaagatgatcatcccacaaagcgaaggagaaaaggaaatgcagaatctcgacgcgcatggttggaacaccgaaggaggtctgaccgttggcgtcaggctgcgcgtcgtgctactaacgagcttgttacgggaaagtatttagaattgtctttgagtcctactactcaacatattgcagccagagttgagttcgtatcccattatagactttcttatattgataaagtgactgacaaaagaaaccgcacagaaaattgattcagcaatcccgccagatgcaaaaagaccttcccttattcttgcaacggtcccccgaagaagctgcagcaggtgcttacagatctgcacgagacgaaggccgtgccttcgctcacatagaattcacgtaccaggagtttctgctacatcggatcttgctcaagcgccttgggatcaactcgcgaggactcatcgaaagctctttggaaatagttactactctattagacattattgccatgcagacccagtctgctcaattggtggcgaatatgtcgtgggatgtaagtctgctctggccccctcaatactgccatgaaacgtttattataagctcatcattttctagttatgctatattggtcttcctgcagcaggaatcctgacttcgaaactgctctcggggcatagccctcagatatcgaatctattaccagccccgttacctgccaacattcgttcatttgctatccaaaagcttaatctttttgtctctcatctgatcttcctggtacggccgcacgaagggagttacgagatgggagttacgagattgcccaacaagggtcgagatttattcgtcgggtgctcgatcatattatttcacctaaatatccccaactgcctccggtgactccggatattgatctgtctgaaaattggctcgacggttgtgatttggatggtaatcttgatttcatggcgtggcttgacaacatccactgggcgcaggaccctttattaaatttcacctgactgaatcatccaatatatgccttcatgagacgcacatcaggattatgcttctcgcaacactaccttcggccattttcaaggtctattgttttcttctctttgaataaactaccgctcatgcggattatcctgtattatgtacagagctctatacggcagaagggctgctctaggaaccaaaattgccaagtcgtctaatacaaccgagctttgaacttatgtcacgtacatagattcgaatagatctaaaagagcaagaatttgtgtcataatctgtatgattatcaataatgttactctacggatcgtgatcattgtttgcttgtttgcttgtttcttattcgctattcgctatttgctatttgcttctttattttgctcatatatttcttgcacaatacctagccagagtgaaataaagccagaaggacacagagataaacctggcggctaggcaggcaggtacccctccttcgcaagactaatctaagcgtgaaagcgtaagcggctaatttctaggggagatatctcctttggaccgcgaagagactggacagggtatatttcgtaacgttgaatgtcaagtgactgaggcggatcaccagcaggcatgggggaaataatctcagtctgcgtgcatcttgggatcccttgacggtcatttctgtaaagttcgaggactccactgactgagttattggcatgcttcgtccacttaacaagaataccgattttgatcgctctgtttccactaatgagtaaccgattcatgtcatcaagaaggtcattggtattggtagctcaggggaaagaaagatgatatattattcctctcgtgggtaacagtcattatacgactcgctccatccaacctctgcgacaagagttggaaaggcctgcgatggggtgtgaagaaaagcatctggctcctttcggagcccgcgatttggaccttctgtgaatgacagtgctttggacatagtattagtaaggttacgatcaaagtcgtcagttgaactcacttgtgcctatctgaagaaggagaaggtctagctctgctaggttcaacctatcgtgcaggctctggaaattgagactgaaatccattcgtcaatacaattatgggcataagttagcatcattttgagtcgtaaacaacggctttctgggctataggattttcgaatagaaggaagatccttctcgacttcccagaggaaatcctcccaccctggtggcatgtcggtaatcaccagctcatgaaagcccttagcctcacgaagagtattgtgaatagcctcctcgaactgtggctgtcttgaactgatctgcggagaccacagtccacgatgagacgctcgacggagctaaagaaatattaggcattgcgatggcatggggacagaagtgatataaggcgagaagagaagagtagggtgttgaagaacagtatatgtattgcaactgagcggctcatagatggcgtgttcggaagaacagtttatccagacccggaacggatggtctatcacatttgtaggaacgctgatacggatggtaatatgcttcggagacaggcggtaaggagagtcctagtcggatgttgcatggtggagcaatggggccgcctcattcagaatattatgtggcgtatttgattccggcaacccgagcagttgttgaagtacttgttgaagtacttatttaagcagttgttagagcagttgttagagcagttgttgaagtagttgtcgttgaagcagtcgttgacgatgaagtagttaatgtgataaaagtgtgtagtctaacactaaccgtaactagttatagttagttagagggcggtaagctgagtcccggaaagtcaggcaggagggggggttccttgtcacaatcccctagtgttagagcacagctttcgatagaaaaagggaaccttccaatgccaagtgacttccaaacgtgaaagaccactgaggcaatccctagctatcttagttactaccaatgaaatgatcccatggatgatcgctgtactgtctttcatagcaagggctccattcccaaaatgacatatggtattttagataaatcaaattcaatgagtttccttaagaggccctccacagtatattatctatagcttaagttttatcttatagattgcatctcatactcctcctcttcctccactttcaacttttgcggttggcgaataatcagacattgcgagtgctggctatcctgcgagtccgactgccgggaaataggcatatcaacatcgtccccctcttctcggtttattgagcaggcatgagattggttggtcaatgcactattgctagttggtgtgaaatacgaattttggcccttgctgttcgtgacgccctgcccccatcctgtgttgaataaaataacaaacggcttcagacatggcacagtggaaaccataatgctgcagtggaggagaacggcggtcgcgattattgagtccgatagatgcagaggcgcgtcggtatggaaaagcgagcggttgagataggtttggcggagtataatcaaaatgataagcctaaacatctcagaaacatgattagccattgtagttcttaattgccttcatctttgtgatatcagaactcacggggccctcgtcccaaacgcaaaaaccacctcccacttttgcttccatcgcatctgaaccccccatactagtgaaacacacagtccaaaggcaagaatatcggtaatcacatcaaaaacagtgatgattttccaagaaatcgcctgatctcacttgtcagctgtgttgctctatgtgagcaagtataacgtacaaaattattacaatgttgggccatggtgaattggtatcgtggaaagcaactcagagcaacagcaataatcgaagcagacatccacaccgtcactatgcccagaagcatattggaatagagcaagtatctctttttctggcccagttgtttgagaagtaaacatatggaaatcttggccgcgccgtgcccagcaagaaataggaaattcgctgcataaacgccctgaatcgatatttgttagttcctttttcttcttttatttcatgcagctttgaaggacgagattggatgttcagggaagagggagggcgacttttccagcgcgtatcaagttcgacggagagctttggccctcaggtcggcctaaaccatgagaaactgcatccatgatgcttccgacgtgggcaatggccattatctagcaagtacccgatcagccttagagacatgtcgacagaatttaatgggtgatgagattgggaaaaaaagggagggttgaaggaggggaataatatagacttacacttccggtaaacactacgacatcatcaagcttaactggtccattgaccgcgagacgcatgtatagtcggaccaaactcactatgatcatccacgtcatgaacagtgtttcaacgatgacaatcaagccacttcgattcgtgacggagactgcatagggggagacggactccatgggggcgttcaagataggcgagatgccacgacgagaaagcagagatttcacgatgggtcatggttataacttttgagagatactggggccatatttgccgcgaatgaatccgatgattaaatgagcgacaggggtcctgatagacttgatatcttgtacatgcaatcatctcccgtaataagtgtttgtgatgcatattcgaacgctatataaatcattttacttattttaaagagcagctggtcacagcgaattaattaatttaagatttaataaattacagcatatcttagcctttcagacccgaactcgattctcgagaaaagtctgatctcaagtaattatcgctctcccagtgagattagtatgcaaaggatatatatagtaatgggttaatgggttgatctgaattcagaaaaactagtatgtaaagatctaaactaggtaataaaaaataatgtattcagcacaaagtacggagtactccgtacagcctggacccatgtagttgcgaaaattagcaccagtttggtggaccttacggaacgcacagtgccaatctcggaggaagtgcaggttagtataacgatgcaccctatcagatgatcctaatatagtgcatatatataacgtagctgggattgttattctgaatggggccagatttcggcgggacggctggaggcagaccgcgggtggtacttgtgcttaaatgccccacccaagcccgaaggaagaaagattttctctttgaactaattaatcacgcaaaagagcttagtttacggagtacctctagtacaaatacagctcgtgggtcggggtggagtatgtactatgttgtatatggtgtttgaccgtgccctaatgcatcgtacttcggccgctgccaaccacaacccttgcttgttgaccagggttcgcaagatacaatatagaaaatattattactatgctagcttttttcacgtctcattatctacccctgcacgtacgttgtattaatttatttttctaaccgaaaagcactactacattctcgccttagttgcactatcattgaaaccgtattctcaattcctttatctactttctggagctctttctttcctccattttactgatatattcttcagatccggttcatttattccccccccctcattaatccgccatggggcgcgagaacggaatcatgttgaaagttcaacactccacgccggagacctcctccctggacctcccctcccagaaggcaggcacagtgcaggacaaacaagacatgtggcgagccgggcgagatcaggaactaaacgtaggtaactttattcaacctttttgagtcctcctttccaaatcaccaaaatcagagaaaaagaagaatgaaaaaaaatgacacgtcctgcagagaaatttccggtttctttcggttcttgggtttacggctgtacttatgtgcacatgggaagcagttctcttgtaggtctctctcggtaaattgatcaatgccttgactaggataaccgacttcatatattggatctgtgctgacctattgaataagtggttcatcttatgggttgactaatggtggcaaagggggtatgatctatacttatctcgggggtctggcagggttcagctttgtgattctctcaatggctgaaatggcttccatgtatgcatatcacaatacatgtcttggcgatgagattgctaacctttatttcctctctagggccccattgtccggcggccagtatcattgggtatcagaattcgcaccccctagttcccaggccctattaagttacatcactgggtggatttgcgtgttgggttggcacaccggtatcgcaggatgctgctatacagtcgccaacatgatggtcggtgtggttgccataaattaccctgacacgtatacctatgagccatggcatgtcacacttctagtcattgcggtagccctggtagccttgatgtttaacacattcctggcccagaagctccccttgatcgaaggtattatcctgattgtgcattgcttcggtttctttggaatcttgatcccactttgggtgttgtcccccaaagttcctgcctccgaggtattcggttcaatagaggaccggggtggttggggtaacaacggactctcctgtatggcggggctggttggtcccatctatgcattgattggtatgtccgcgcgctgatggatcctattttggctattgctaacgacatatgcggagaaggccccgactcagcggttcatatgggtatgtatcctgttattccccgatctatgtggggaaataactaataccagaatgcagcggaggaaattcgagatgcatcccgggtgctccccatgggcatggtctggacattgatcctcaacggatccaccggcttagtgatgataatcacatttgcgttctgtgtgggcgacattgatgcagtgcttgagtctgaaacaggctttccattcatccaggtcttcctcaatgccacaggatcagttagcgccgcaacaggcatgacagtagtgatcatgaccatgcaattttgcgcggcaatcagtaatgtcgctacaacctcccggcagatctactcttttgctcgagacaagggtcttcctttttccaatttcttggcacaggtgagttctccgacacggcccccatccattgctctaactaaaatgggggacaacaggttaacccaaccttcaccgttccactgaatgccctttgcgtcagtctcgttatcgtctctctcctctccctaatcaacattgggtcttctgtggctttcaatgctattatgtccctcggaacagctgcccttctgtcctcctacataatttccatcacttgcgttcgtcttcgacgctggcgcaaccagcccctaccaccggcacgttggagcatgggaaagttcacccccatatgtgacaccatttccatcatggtgttgctagtgatatggatctttagtttcttccccttgactaaggatgtggacccgactactatgaattggagtgtggccatctttgggggtgttgttgcggcatcactcggttattatgtgatttacgcccggagagtctacaaaggtccagtgatacgggtgaggatgttgcagcgatgattagtcatcaagtggcttcctggtcacgtgccaccaaaaggcggtgtggatatgaccgccctggccctcggcagaatccccatcgaaaggcctgagccaactggagatcgacctgattgagccatcggccgattgacagttcagtatggagcaatcatgtatccacttagaaatctagcaattccttgttttctgccgctctgccgtctgttaaaaactaggctgtcctgtcctgatgaaaatcatcagaattccctacctacatacatctcatgtcaccgccagagccgcaagctggactacccaagttcaaactagcacaagagagggaactatacaagtatgtatgtgggcaggtttccactatccccgagtgtgccggatcgcaaactaagactctatattaaaaaaaagatatcttaaacccaacgaagttttccaacctggcccaggcacgagatatgaggatgcacagaatcaacgtactacatatattccccgcttatcgccagacacagctttgacggccttcgcccaattaggagttttaaggttcaaagctcaacgcgccttgatctcactcttcggtcgggaccaacattacatcctcgcagaggccactcaaacccttactcttcaagatcatacagtggaaaatgatcgagatgccttgtggttgggttgctgcgttgtccccaagggggatggaatctgtcaacaagtcgcttccctaccgcaactcaaaccagaggataaacacgtggtagagggtatatacgtggtacctgatctgcgcgaggatgatcggtttaaccaattggacatggtcatcggctctcccaaagcaaggttctacgcaggcgcccccataatcagtcctaaagggatcaccatcggatcctactgtattatcgatgacgagccacgatccggattggacgccccgttggtaaagttcctacaaaatatggcatcgaccgtcatggagcacttggacatggcccgatccacaacggaacatcatcgtgcagagagaatgattgtgggactcggaagttttatggaaggtaaggcgacgctgcgcaatgagtgggtacaggacactggactacgcctgaatgaacagcaacataacgaaggccacctgaatatactgcagcaaaatgtacaaatcaaatctggtcttctcacaaccgtccatactcgcccgtcatcctcgccgctgcagccaaaattatcttcacagaatggttctgagcaatttatatcatcctcatccaatttgtccagtgtaccatcgcagagcctctcctcaggaccatcttcctcgtcgtcaacgaccctgtctgacaaggattcaaacgccagttttgaccagacgtcaagtctcaacaaatccgaaacacaaagtagtttctccgttcgaagcacgtcgaccgagaatctacaagctgacatgctgtctgtcggagttcgacaagtattttcacgagcagctaacatcatccgcgagtcgattgaagtcgaaggcgtcgctttcttcgatgccagcatcggatcatatggtggtctcgtcaacgatacgaagcgaaaggggccaggctccgacagcggtaccttggaaagctccatggacagcagcgatgatagcaccgaatctgattctcagaaaagctctaccgcattcgggaaggacagcacaccagagaatacgaccttgtgtgaaatcctaggcttctcgacttccactacatccagcatcaacgacgaatcaaaaggaagacttgccctccgggaagtattgttgaagacgcttctgcggcgttacccgcatggcaaaattttcaatttcagtgaagaaggatcgatgtcctcggacgaaagcagtgatggaccctgtaatagctcgttagaccgtgagagttcaaagacggccaacatcgacctcactggtaaaagaggaacaggaagtcggaaaaagacgcgcagtgccacgctcaaagaggacggaattgttctcattcgactcttcccgggagctcgcagtatcgctctccttccgatgtgggattcccaccgagctcgatggttctcgggtgctctggtgtggacgaacacacctcgacgcgtcttcacatctgagactgagctcacctatctgtcagcctttggaaatagtatcatggcggaggtgcatcgtctggatgtcgaaatgtcggagaaggcgaaaacaaatttggtcagcagtatctcacacgagttacgaagccctctccatggcattcttggtacgtcagaaatactccgagacacggcgatggacgcgcttcagcacggattagtacacacgattgaatcgtgtgggcggacattgctggacacgatcaatcacttgctggacttttcgaagataaacaatttccggaaggaaggaggtaacaaagccctccacggacggaaaatccatcttaaacgacacaaaaacacagacccatcgccttacagtaagcctccacgacggacacgacatagtggcatgatcagtttgaagtctgatattcagctggattccgtcctggaagaggtaatggaaagtgtcttcgcaggctacagtttctaccacagttcacaaaggtcaacgacgatagaccgtccgaatcccatagaacttgacgtattagggtcctcccagcaagcgagtcaggttagcatcatcctggatatcgacgaagctgctgaatggagattctccacccaaataggcgcctggcgccgcatcatgatgaacattttcggcaactccctgaagtacaccaaggctggctttatattagtgaagttaacgtcatcacctgtcactcatgccaaagacgccgtgcccggaggaccttctgatttcaaggtgaccctgctggtcaaggacacgggtatcgggatgagtatggagtatctgcaaaataatctattcacgccattcacacaagaagactcgcttgcccccggaaacggactcgggctcagcattgttcaccatgcggttctgtccatgggtggtcagatcgaagtcagttcactccggggtcgtggtactgaagtctcgattgaagtcattcttacccacgtacccattcaaaatgccaacttgagtccctccaaacctgagctcattttaagaatcaaagactttacacgtggcacgaccctaggacttctggagctgggatcatctgacatccacgatcgcgatacaattctctctacctctttagaaaaattgtgcaagaactggttcgagatggatgtccatatcctgactccgtcggacacttctcccccctcatgcgacttttatgttgcggtgcagaccgataccgactcggtgaatacctgggaatcgtggttgtcaaaaactcgagatggcaatattaggagtcgaatgatttcaattgtggtgatttgtcagtcgccagaggcagcacatctcatgtctgttgcggcaaaccaatcgaaccacgaggctatcgtcgaatttatcagccagccctgtggcccgcgaaagttggccaaggcatttaacatttgcatcaagcgacaacaaggtcaggaatttccgattgggaatgactctgatatagatcaacctcaagagaagaatgtgtttcagttgacgaagtcacctctggtttccagggaggatatcgacgcacaacgtgctagagatgagatggatttccaaaagcatcaggcaggaaaacaggcgatagatgatgaatatcgcaagttggagggaatgggagactcatggcaacataatgacgctcctcttcctcacactgaaagtgatgccattactttgccaattcgacagggattgtccaggaaagaggagccgacgttgacagtcttgttggttgaagacaatgatatcaatctgcagatattggtcgcacatatgaagaaagaaggatacaggtacacaattgcccgcaatggtttggaggcgtcgaacgctttcaaagcccatcctggaaagttcggagtggtcctaatgggttagttcgtctccttgttctaaataaaggactgttctgacaagcacagatatctccatgcctgtaatggacggattcgaatctgctcgccttattcgcaaggctgagcaggaataccagaacacgctcgatatttcagcaaaaggatcatttagacctgcgactattgtcgctatgaccggccttgcaagtgctagtgctcaacatgaagcttatgggtcaggaatggacctctttttaacgaaaccaatcaaacgaaaagatttattcgcggtattgaaggagagaggcccaggcgaggccagaaatccctctcaatgatataacacattaatgacggtcatgtttcatctttgatgtcaagtatatatacgattttacttgttttgtgtttgttcttcttcccaatctaccattttgtcaagattaaagattagcactaatcgttagggtacaaaggtcgttttcaccatgtcagggcctatttagaccgcttttaggcatctgacttagtgggctttcgggtgtaggtatcgtaaattatgacagcacggaataaccaggcctgatgaccctgggcaaaagaagcttttggcaccatacaaatttaattatttccatttttctaagtgtcttgtaagaaaacaagtaagatttaatgaaccaatcataggaattggagtaaaccatttagaaaatggagataataatttgtatggcgccagaagcttcttttgccaaggctctctctgtaatggtaattcacgtatccttagttatttttttttctgccaggccaaattcagacattaaggcctcattatggtgaaaacgaccttgcgcgctatgcccgccccttcgtaattggggattctggcgggtgtgcatagcgaccttgtctctattggctattaggattcgattcatccgccttaatttctgtccttcctgatgagaagttgttctatatctatattgaggtagtcagaatagtcggccgctattacggcctctatacttaacatcgcgcgtaaggatctggccggctgcaaaagtctggcccaccttgccacgaagcaaaacagtgtgtttttggaggtgtgctaagccttgggaagatagcacagaaccgcaccaatcggaagcaagcccatgaccccggagatccgtaggaccttagggcggggatttggcggacttgacgacctgtgtttttttgtcgcctatatcctctctctccgcattgaccctcgtgtcgagctcagcttccaactttcggttccaattccctgggactggaatcgaaacatttggggatcagcttgatggagagattccctctctttttttcgcattttactcttctctgtcgctattctctgtatgttgcgattgtacagaatagaaattcgccaataagtagcccctcgagctagataggatatggctacacgtattacgccatatctaactatcatgataggtgttaggcttgcagtctgttttggccgagcagattggtcaatactgaccctttgcatacgcttccccaccattcaagcctcctatttcacttgggggtcatggctagaggggctagtctcatacaatatgagtcgtagacccttgaatggacttattatggctattcggctgctggtagttatattcggtgggaatttatttgtcatgatagcctgtcgtagtatccctgagacctatccatgtaccactagcaaggatctgtactatttaggcaggagttgataagcctaccgcttcttttttattcctcttcttcatcctctcacattatgagcggcacatcttgaacactactgtttctttcttaccttcaggcctagagataatggatggtcagcaagatgctaaggctgccattgaagccttgcagcgaaggagacttcaaaaccgtatttctcagagaaaccgtcgtaagccatcaatatcgctaccttcaagtcccgtgtgaactcggattccctaattctatgcaccccaaggcaaacgacaagcagaacttcagcaacagcgactgaaggagctagaaaaacaaacgaaagggagccaacggcaaaagaatggcaatacatgtcctcctgaaagtaataatcacgactgccagatgtgcaacttggatggaaactcccagtttgaggggaagataccagctcctgtctgttttgaagaagacataccccaatctgaaggtgtggattgcgagggttacactaacattcagctcgccaagttgccagggcgaaataagagccccagcattacaagttccattcagagactaaatgatctgatgccatgatggaagaaatgccgaaatttgtactggaccacgagcccggggtttgctctttatctgatcactttggggcctcaaaagatctagagacacatcagaaacaggcaccagaagagattctgcaatattccagacagtctcaacagcaaaaatccactgtgagccgaagctctcccgtggggatggccctatacactgaaaggatgactggaaccaatgtatctacgccgacgctgccattggaggcccccgagagcctacgaagcgttatattgccgaggacaaaggtaaaatggcactacacatcagcgtcgagcgtggtaatttggcgattgtgcgtttcctgctactatatggggttgacgttaataggagggactactctgggcggacagcactgcactacacagcacacggcgcacatcaaaattgttgcagaattactcatcgcgggcgcggacccagaagctcgtgataacgagggtagaagcccgctacatgccgcggctgatgctgagtgtgagccaataatacggttgctagtgcgagagggtgcagacctaaatgcagccataggaattagcggtattagcagtagcgaggagggggatatgcctttttcatggtggattgagccgatggatgcatgttcataattatatgaaacgagcttttttcaaatacaagaacagtgagattatgatttgcctttgattcaaagtcacgattcaacttatcttaaactaaatagaccaacgatgaaagcttaagtagtgcaatgacaaaggttgacttcgtccagttcatgtagcaaatttcgtatcgggtcagcactccctatgcagtattgcgtgctcgggagagtagggtgtagggtgtattctcaatccagtacttttcccttactgcgatgtaacataacggaatttaggtacctgaagtatcgaattggggaccgggctttcggtttagttagatcaatggaatttatcgctagggggccctgattttgtgatatgcattcataaaaccaccaaaaatagattcgtttgaacaaaacaaagacggcaaacacctcatataaatctgagagataatcaagagttgttgtaaagtaatacatatatataccaaggactgcattctcatttctggagcattgctataatttacatttttgttgctcagtgtaatatcaaatggaccgacaataaaccatccaaacaattgcaatagtgaaatagcatcaaattttagctactattccaagtgagagatttgacagtccatggttcgaattcaaatatccctgcccattacgtacgtatacataggaggttatcataatgcatccctttgttgaagacatgtcatgtcatagtacattatgtgttttttgggtagagacgagcaatgtcttcgggtacacagtatctgcccctcacagttccagagactgtcaaaacttttacaccgacgtggcgcgtcaatgggtttccaccttcctagcccagatcccgaaacggggttattcacatcccgctggaacaatactggtgtcacatcggccatgcacttcaccatattcatcagcatcatgttacagtgacgggcgtgaatcttcatgaagtcttctgtcctgttcagtattgtacggaagtcccactcattccgatgtgcgaagagccacaagacaccaacacagtgaacctgatgcattactggttcaaacttagcttcgggcctgttacaagcaggccgaaacggtggctaataaagggttggctggtacttgccttcagacatggcgatgacttcgttgtctcgtggcggaggcagactccaccattcatgggtctcggttgacttgttgatcaagcttagtttctcatatggaaagctaaatcgcccggctgtattcaagctctagtgtcagagattttcaaacatgcaaggccacgatggcttactcttccaaagatcgtcccatgcatcccgacgatcctgggtaggtaatccaataaattcatgagatattagatctgagttgtattgtccccattcatattccaaaaaatctgcttcggggccttgtattgtcagttggattttgccatagctgggagatgggaacctctcttactgaatgcccacattcgccgttgacacgatgcatccgttgccgcgaaataatagcaaatcgtataaaacagcaaactgatgataaaaacagaaaagcatagaaaaaacaccgtagatggacgtatggagaagcccgcaagcttgctaatattttttgtttcactctccctatacttcaaactttcctcgagcagtggaaaatctgcgtcttcttcgtttgtatctgcaggattcacattgccattcgtaatttgctcgttcgcccgctctagcctctcgtagccagatattgtgagatgagagccggtgggttcagttaatggcaatgcagcaaaagactttatagttgccttcgatcatcgtaaacaagagttgataaacttcaacaaaattagagatttctcaatgtaataatgctttcatctaaaacttagatacccagcaacccaggatctcattttcagcattctgtcagctgaggcctagtgcggtcatccacggtaagcatttggattatggccatgtcagcacacaatatgcaagttttctaactactgcaatattcggcttcagattatagtgctttgcacaaatcggactgtggttcctcttccatgaatcaatgaccaccaggccttgtacattgttattcaagtgggtaggccttccgtatcgctctttatcaatactaaaatcctctcattagagtcacgtcatacactacctaggtatggctgaccgattcaaggaaaaggctagggtgcctttgctttattctatttctgcggccttggccttcgccgtacccgtgatcgtgtttcaagcttttcaaattgagccaagtgatgcaagatgtgatcgtctgacttatccctggtctcctgcactggatatggttgaataatactgggagacctttgagaaccatcagtttgctattaaaacctcgtatttcgggttcgaggcaacggatcaactagaggatatatggaatgaactacttccaggtatgccgaatgagattatttggccctctttctgcttttcttgctgtcaaatatagaaggagaccaaaaatatgagagctgaggactaaattcgatacagagcaccctataacgataccgtcttctcgggttgagagccttggtcatggaaattctgcagatgacccagactggattcgggatccacacgacaccagtaatctcctggcattgcctgaatacgctgtacagctcggctgtttgaattttctccgccaggtgggctaccgatccgatcgtgatttcacatacttgaaatcgttccaaggtgatgactctcttgtctgggcccgagcatatcagtgcatagagcgattacgacacgccatcatgaatttcgattgaattggcttattattggaattagcttactgatatctttgaaagtgctggggtgacgttggtgccgttacactattataatggtaatacaacaacggaagaagggttgtttagggacgtgtcatttgattttggaacactgcatcgttgtcgaaactttgaaacatagacgaatggattagagagaacggcgtcgtgagcgtcaccatgaataatctatggtggggaggaggcaatgtggtctaacagatgctcacactgatcacgcacttttttctgacagtacaatttaaaacatttaaaactatacttgtagtaattatcgccctataaagatcgtgtattatacaaacggaaccctaagcagccagagtaccatatggctgcgcttttattattgaaacaacgtaatcaagttgatccagtgttatctgcctcgtatctctcgatggaaatgatcagactgcaagaagtgtagtcaattaatagcattgcaagctaacagagaatttgaggaaaaagaacaaatagagaggggagggagaattcttcagcccacgagcaagcaagtagtatctaacccgagtaatgaggcgcaagagagccccatgatccagcctctaacaatatttctaaatctcgagcttcaggtcagccaacatttccttattcagcctcacctcctctttctggtaaatgcaaaacttgctttcacccatgccatcaacaagttcacgaatattggcaattaaggcctcagcctcggatcgtcgtgaaggaccctggccccatagagctcttgtgataatcccccgagtgttgatagcttgcggagaggttttgccgaggtgtggacaagcatccatccactcacaaaccggccgcgcaatttcctccgcttccctatatttcccagccttgacaaagtactccgctagcatatgaagagggacaacgttcgactcgtccggctttctctccactagcatgcggacagtttcctcggcctgcgggaggttcaattcattctcgagtgtgtatattccttgccatagcccataccaccgtttgtaatcgacatcatagagtgactgaggtggcgagattgccgtttcttcgtttgccagcttatttcgaagtagttgaaggagaagctgaagctttttttgctggtctgcggtattgtcggagtctattaccactgggtcgatggctagctgttccagttcggcatctgaaaagttgcccagaaaactccgggcagtgccgtagctgaaactgtcccagaagcgattgaccggtacaggtgcctcccatgaaaatgactcggccgcctcagcggtggcgatctcaccggttgagtaccgggaagatgaaacgactgtcatcctcgagatgaaagcaaagtgatgttaagagaagagtttgttcgaaggtatcggctgaaggtaaagatgactgaatcttggaaatggcgttttagcgttttattccagttatggggagcggtcagaggtgagggaagggcagcttactgtcagacaacaaagaaacgcatcgctagtatccctaaactggctaatgataaggagacaaaaatgtgaaattgtgtgctgatagacgcaatgagaaaaagattaagccaattctttctctctcgtattatttattttcatacatgacagagagagaaaaatggagatctgtagattgatttggcgccaaaagcttcatttgaaccaccctagaatgtggtgaatttatatggtgctaagcttgattttcatacatggcaagaggtcatcggacctggttattccgtgccggcataatgtacaggcataatgtacaattcggaggcaatgtacatagttaaccgtcaaacttcaggccaaatgttaggcattaaggccttaataatggtaacaaccctgggtagatgaaggaaagtgggaactaaagtattgaaattcataaggcacacatggactcttggagggccttgggcgtctaaccctactggtgctactgatgtcaagccttcgtagtacgttgtgcttcgacaaccttcgacaaccttcgatgcgcaataaccagtgccttacaacgccagcagaactagggtaccttgattccataatgaagccatgtgtaatggctgtactattcccatacctcccgaggtaactacaggcagcctaagcacaaaccacaacagtattcttttccacgattttttggaaacgaagatgatatgattattgcaaagacccgagaacaagcgttgattacatggaaagtaaaaagtccgaattttcaaaggcaccattttcccccacttcaagactcctcgagatctaaaaccctaaattaatagactaattaggcattactagtaataagtggagctaatggcagcatacttgcaagtgtgtagatgacatcgcagctagtgtgctgacgccaggctgacatgcacccatatctgcctaatatctatggcaaatgaattcatgcgtcttacacttgatagttcagccaggactggtctggctcagtggtaaatcgtagccatcttctctctcggaactctcaaatgcaattgtacaagctgcaattctcgaaataatttctcccttgaggcgaaccatggggctttctaccatttctccactcgctaggtatctttccctcgggggctcccccagagaattgcgacaatcaaattctcatgggggtggcgatgatcgttggataacactgcgaggcggtatagtctggcagagaccatccatgcgggttcatgctctggggccatgtggatcgtttcccacttgccgtacagccagcattggacccacgacgagaacgaccctcattgagccccagaccacagatggatcccctggggatctgaggtcaggattgctgtggcatcacgtaatatcgctaaccgtccatagatgggtgagtatatagatcttcggacgcctattccaagcttctctattcttaacgcacataaggggcaccctggcaaaaaggggggtcttgagtgtagaaggtcaacctctagaaattattgatccgcagtacaggaggttaccgtctgcatgattgtctcttctgtgactatctgttatttatgtttgctagatagattgttttaagtgagatgttcgaggtttgcaacgtttgcaaagagtcagctatatcaacaggctctcatttgcaacttgcttcttctttctttctttatcttcgttgtctactctctattgttgatcgatctggcgcctcaggggagtggtgctagtactgatataccatacttacaataccataccatgtttcgtgcatttgaagacaccggtctaactacttctgtgtatgcgtaatctaaaaccagacatccgtccatactcgactgttacagactgttttcttgcctctcaaccctcagcatgaacaccacaccggaacagatccttgacgtcgaagatgctctcgtttcagacaagaatccagcgcgcgatgaagatacacttgattttcaacgctgcgccagattgcacaactacctggtcgcatatgcctacatggcgcgtaatggaaccaatacgcctgatctcgacgccctagccagggagtcatggttcttcaaccagccgatcgagaatattgacgccattcgcgctcggcttgatccatcattaaactcatttcttgattcaatctatgatccgacgccgggattcttctactgggtgagcaggcttcgaatgagacttgccgacgagtctttccccctcgaagatagcgatttcgaggataaagagcggtttgtgatcatttacgacacaactcccgatctaggctcccattgtcttggtgttctctacgaccagctgaaccatcgtgcctcgttcccattgactatcgagaattcagaaagtatcgagcctgttgctgaacattgggatatgtggttccccctagagacgattcttacccaatggatctatatgctccgaatgggaaagatcacggccgatccacggaaagagagagacttatcccatgaagaagttaattcgcgacatcagattggattatggtgttggcacccatactgcgctgctcaaattgatagtacggttgctgcgatggaccgctacacggacgcgatcgaatcacggatgcagtcacttttgccaatatcccgagatacaccattttttaccgatacagacctcgatacggctttagtgccaaaggagtgctttattcgctcttttctgacccgagtgaggaccccacgtttcaagctaatcgcgccgggcctggaggttccgcacgataaagaagccttcacagcgcgtcagattttcaacgcggaaggccagggcagggatgtaccgtcattcctcctctttgcatctgcggatgataggcgcacgatcagtttcaacgaagaaatttatcgtctgttctttggatcgagaaatgatacaccattcaatgaaggtgatcctgttcccacaggattatatagtgcaacggtcaatcgattcgaatacgattctgaagagactggattccaccttttactcccattcacactacgaccgaatcttgccgacgaggacggagctaggcggagtgatggaactctagtgccatctggctcatccacgcagcttttccagcatggcgtttttcacccatttggcggagagcaccgggctcaaagattggagagactatttgatcgatggactgaattgatcgaaagtggcgtgtggacagtgggcgaaaatggcgttgagggagggatcgatatattccgggatgcagatcatggcgcctgggaggattactggattcccccatcctggtaacagtataaccgcacgaatcgacgagatagcgtccgcgtctgtgatttagtgtatggagaggcaaggggcatagtaaacagaagtaagaataaagtcatattgaagaatcaggtgtctggtggtttcctcccttgcaacctacgagttaatacgaaacaacaaaactaaacgcttgtccttagtgtgactttgagggaattgcaagcagtcattcccctacgctcttgaggctttgaaaccctgcttgcaagcatcggcatatatatgtcaagtccatcaccagataaccacacttgactcaaatgactctattcacatcttgatctaggtaatatacgaagtcaaatcggccggaagcctcttagtattcagttacatcgctttgttaacttatctaattcggaaacgtaatattaatcaagcgtgagccgtgaagggggacgagacggctctgctggggaatttcgcgcgggtatggaatatgactcttgtgcatggccatttttcgattggttgatggctttgaagcctcggtcgaagttcttgatgcaaataatggcgcataaaatggttgcagaagtcagcaccacagataccgatgcaaagaataacattatgtccttcccggctgtgacagccccgcagagaatgatgatgcggctgatgagatacacgagtaggccgaggtagcatgtcttgcaaaggttcagcggtagttcctcgtagaggcctgacagggtaggaagcaagggagctcacaatgataccaacaacgccaatggttcgctcgtgctggacaagccaaataccaagtagcatgacgatgaatgaggccggaatgaggaacattgtgagagtatactccggttccttaaagtggacatacaccaggttgtattggatgatgaagcccagcaggaagtaaaagaggagttttatcaggaccaagaagatctgtgctcatcttttgttagttcaaaggccagtgaagccgtgggtggtggaaatcacctcgtagaatagatagcgtattcgtgttttcaagctgccatgaacagacttgtagatgacccatgaatactccctatgcaaatagtatacaacgaagcacaggatcagggtgcaaaatccagtaattattgacactacaatctccgcaggctgaatctggggccagaggttgcgagtggtatccaccagagttggaaacccatagcgctggtcaaacagttgcgtgatagctcctctcatgtaaatgtactgcataatagagtacgcaaaactgcaggcatcgcagacgcagattgaaaagagaagaacattatttttgttatggatcgcatccagggcgaggatgaactcgtagaccgaggcgaatatgaaaacgcctaggttgattgggaccatgtaggctactggaacctgagtgatggtaggggtaacccatagctgccattccacgagtatatagctaggtttctggttagggtggctcgggcgaagatagggactcaggagagcatacgtcttaagggcaatagtcaggatagcctgcgtgaataacacgatacacaaccaccattcatttcttatggttggtctatacatatcaggttgcttttcttctctctcgctggatcattgaatatggaaataaatattttattttgatcttcgactatttttttctctacctccacgtgatgtcttctatgcagtgagtgtcaaaccaatgggaatcattgcggcaaagtgttaaccttcttcggtgcgactgacgcagatctttcattagtacggagtagttgtggatctctcgtacggagcatttttatggtataatacctacaacatatccattgttcatgtatttaaggagatgccaaatccgaatccaaatacatatacagttggctccaatattttcaggataccagtctttttgaatattacccccttttagtgctctacgtacacaaacagtgggacctctgaaatattgggccaaatattgcccagatgcacgtatccacatatactacggagtaccgttggcccaatatttcagggatcccatagtttatgtggtttatgtgcggtgaaaagtacttcttacaaaccgttttcaatacatacaacatttatcatacgacagatggacatgtgagatataagttatacttaaaaggttcagttctgccaattgaaaccctgggcaacgtgaaatcttggaatatatatctgaaatatcacccgaatcctatatcattactaaagaatcgaaccaattcacttagattggaaactaaactataccatgtataaaaacggtagttccgggcaaagttgttgatttagtaccgcatggatctaaggaaaggaaaaaaaaaagaagtggacgggcagcgattcgaacgctggacttttcgcatgcaaagcgaacactctaccaactgagttacgcgcccatttgatgtaaatcctgaggaactttggttatacattgcaaaagcaaataagctaaatttggctttatgctgtgagtccgaagtatcttgacttgactgttctagttcgacggagtttgggtagaaaaatttcttctatctgagtcgttattaaataatgagcaggaatattctgcgcggtaaagctgtggcctagtagaataggcagtgagagggaatccgacatgatgaaggttgtacatcgaagatatcgaaagtgatatcatctatgattacatccatggatgtacttcgcccgattatgtagacgccgataacaaattaggatcggaagttctatacttaaaatgataacttttttttacgaagactatctcctctttctcccttttctttctataacttcttggatctatctcaacgctacccagataatgccgttcgctttgatccgccagccattcaaaaagggcttggtatttctagccacaaactggcgcctccacgttaacgtttcactatgacctatgattatgatgcactattatgatgtggacgaagaataacgcgcttggaaagaaatgctgttatgtccaaggaaaccaaatagaagccactttagagagttggccagaggatactgacgaaaatagctgaggtggcttggatggggaatctggtgattttctttacttttggttttgtcgaataacactaatatatgataacttgaaacttgaataattgcattccggctattgggttctgatcgaaactcgggggttgttgcgctctctctcgctttaaatgagtaagagtaggactgatgacttgaatatccatgtttgtttgcccagtttctgctatactgaacaatgaacaatctacaataatccgtattatattatcatcgagtgctaatatagatggagctatcctctcctgtctatagcccctaattcagtgtaaatagtgagttatcgttatccttactcttctgtcaggctaaattcaaggattaaggcctagaaaaagcagctggccgctctgcaaatggtaagaaagcaaacaagacaaatataaacatcacgatgatccatagacaattgtgtagttcgtatgctgtatgtccacgaaatgctcgacaggaataaagacacttcactacaatctatttcactacaatctaccttacagtttaccgtctcagacataaaatagaaagatgccagttcttattatagaactaataaaaatgaaaagataaaaaacatcacagagggtcgtatcccatttcccatttcccgtaagacttaaaaattagcaaaaacgcaagaaggggccgaattgatctaatcaacctcctccatggtgctctcgccggtagcctcggcgggagcagcaacctcggcagcaggagcagcctcgtcctcgtcgatgttcagaccaagggagacgagcttgtgaatgcgctcggcgaagctggcgggctcctcgatggtgaagccggagaccagcagggaggtctcgaagagcagctgggtgatggacttgacggtgcggtcgttctcgccatcggcgtcaaccttcttcttaagctccttgataatgggagacttgggggagatctcgaaagtcttcttggaagacatgtaagaggacatggaggtgtcgcgaagggcctgggccttcatgatacgctccatgttggcagaccaaccgaactggccagtacggatggcgcaaggggagccaaccagcttggaggagacaacaaccttctcgaccttgtcgccgagaacgttcttgagggccttggcaagaccctcgaactccttctcctcagcctcgcgctcggtcttctcctcctcggtctcctcgagctcgaagtccttagtgatgtcgacgagcttcttgccgtcgtactccttcagctgggtgaaggcgtactcatcaatggggtcaaccaggaacagaacctcgaagttcttctgcttgagggtgtccaagaagggagagttggcaacggccttgagggactcgccggtgatgtagtacatgttcttctggtgctcgggcatgcgagtgatgtagtccgcgagggaggtcatctcatcgccggacttggtggactggtagcgcagaagcttggccagaatggggcggttctgggcgtcctcgtggataccgagcttgatgttcttgctgaaggcggcgtagaacttgtcgaacatctcgcggtcctcggaaatctcgacgaacagctcaagggtcttcttaacgatgttcttacggatgaccttcataatcttgttctgctggagagtctcacgggacaggttgaggggaagatcctcggagtcaacgacaccccggatgaagctgagccactcggggataaggtctgtgcaatcgtcggtgatgaagacacggcgaacatagagtttgatgttgttcttggtcttcttggtctcgaacaggtcgaagggagcgcgcttgggaacgaagagaatagcgcggaactcaagctgaccctcaacggagaagtgcttgacagcgaggtggtcctcccagtcgttggagagggacttgtagaaggaggcgtactcctcattggtgatatcggcggggttgcgggtccagatgggcttggtcttgttaagctcctcctcctcgaccttggactccttgatggtcttggtcttcttcttctcctttttctcctcctcatcatcgacctcctcgaccttgggcttcttctcctcatcctcctccttggtctcctcggcatcctcatcggggacctcggtctcggtctccttaaggacgtgaaggtagatggggtaggagatgaactcggagtgcttgcggacaacctccttgatgcgggcctcgttgaggtagtccaactgctcatccttcaagtgaaggataatcttggaaccacggccgagttgctcgccctcggtgtcctccttaagggtgaaagtgccaccggcggcggactcccagatgtactgctcgtcatcgttgtgcttggacacaaaggtgacacggtcagcgaccaggtaggcagagtagaaaccgacaccgaactggccgatcatggagatatcagcaccggcggacagagcctccatgaactgcttggtgccggagcgggcaattgttccaaggttgttgatgagatcctatgagagatgaatatgagtattggtggtcagatagagatggggaagagtgttttaggtaactcctgaggacaaacttacagccttggtcataccaataccggtatcgcggatggtgagggtcttgttcaccaagtcggggatgatgtcgatgcgcagatccttgttggaatcgagcttagagggatcggagagagcctcgtagcggatcttgtcgagagcatcggaggcattggagatcaactcacgaaggaaaatttccttgttagagtagacagtgttaatgatcagcgagagcagctgagagatctcagcctggaactcgaaggtctcagacatgatggcggattgtgattctgaaagagaggttgagttagaaatgatgaattgataggaattgagcagatgcagagtctgatcgagcagtgggggttggggggtgaagttgggtgaagttgggaagcggtgacggtgggaagaacaggaaggggatttatatcttacaagaaagcaaaataattagaaagaagctctgggggggatagtaaccaaagcaaaggggagagatgaggaaaaagagtagaagaggcgggccagttccttttgtgtctccaaaaaaatctggtggagagtttctacggcgatccagcaacttccatgtcgttcaggcaacgcctgcagctttctcgatgtcattctagactcttctgcttttcacttttgtttctttgtttagactaattactctaacttgcccggtttggcagctctcaccttcctttttgtctatatttttagctgagctgtgagtgcatctgaactctagaaccttccccggatgactcgtcgactcatcgactcatctcaccattaggtaagcactggttagagcgctggaggtcctcggaagtcaactttggcagtacattcgatacatttgatatatagcaacttggagattcattattccctaatccatatttagtaggctcatcattccatgatacagttgtaaccccccccttagaatatcccatttacacatcaccggaccctcatagccaaagaaatcaaaagaagcaaaatacaagaaagaccggtatggcgcaccaccgtaagaccctggagtttgctatgctagttaaaaaaagatgcgatataacgttttgcaaaagaagagcaaggaacagatcatggcagaagacaatgaaagaaaggaatatggtgcaggaaaaaaagaggatcatgaatgtcgaagacgagactcgatcccagcaaaaaaaaataaaaataaaaaaaaggaggttaaaacacaagtgcccagagggaaggaaaatagacgcaacttttccagccagcccggaccaaccaaccgctaatatgcactgtgacgggagaaaaggggaggcaatagtcacgtaacacatgtcattaggaagagacggggcaaaagaaaaaagagaatcaaaatcggagtatacagatcccgagaagatcatccgccgggaggattgctcacaggaatgcaagagtcgtgacaccgacgggaaagaagaacgtagaggatcatcaaaatcacataaggtgtttaagcagcttggggctggctagggcgacctttggcggcaacgttgccaccacggccacgaggagtgaaaccgccgcggccttcacgctggaagccaccacggccctggctgccggcgcggtcaccgcgaccacgacccgcaccaccaccacggccggcagggaaagcgttgctaccgtaagcgttaccacgtgggcggcgctcctcgacgaggatctgctcgctgccaatctggtgggggttggcagcaacggcagcggtataaccggcaggctcgttgaattcaacaaaggcacagttcttggggcggctgacatcgaagtacttcagcttgccgaaacgggccagggtctgcttaagcaggctggcatcaaccttgtcgttgacgttcttgatataggcgaggacggtctcctcaacacggggctgcgacttcttgtggccatcgccggccgtctgccagccggcttcggtggaaggggcctccggggaacgggcaacctccgcaggggcgggggtggcagcagcgggctgagcggtaggggcagcgggagcagcgggagcagcagacttgggagcagtaggaacagcaggggtaacctgagcagcaggagcagcctgggcagccgaagccttggcggcagcagcggccttagctgcgaaagaggtagtcgcaatgctagcccaggtcttaggagcagcgggagcggttgaggtctccttctcaggaacctcccccttctcggcaataggagagggctcaggggtggcgggctcctcgtcgttcaggttttcagcctcgacggcaagaaccgcagctggagccgcctcctcagcggggacaccgttagtctgaggagcggcctccttgggctcctcaacctgctcgttggcctcgacctcctcaagcttctcatcgacgtctgagagagttacttcatcaatcacctggtgctcctcagcgggaacctcggcaacagcctcaggagcttcagcagtaggcgcagccggggtgggctgctcgggttcttcttctggctcttcggccatgtaccggaagatgtcgttaagcacatagtagccgttgggctgctcggcgaggacgaaagtctgcacgaacttgcgggacggctcggagttgttcgagatctcaccaatgactgagaccaggatgttgtcgaaagacgcctgagaatcgacattcaggacgcgcactttgcactcctggaacttcaaggagctaagcttctcgttgatggcctatgggagtggggtgcgtggttaggcgatattcacattgaggaatcgaatctaactcaccttagtaccaacggtgacgggaaccgactcagcctcagtgccgaagaccaactgagagcggcgagagtagaacaagtgaagcttgtcggggttgcggctcatggtggtgtagaactgctcgacgaagtaccagcccacctcatccttggagatctcgttcttctgctggtcggtgggagtgacggtagtcggggtggaggactgcgcaggctggaagctggcagcagtgttcatagtgacagatgcatggttgtaagattcagggtaaccgtgctgagcagggtagttaccattgataggaacctgagtcatatcggccatggcgttgaattgaggggttttatgttcggtttcgggtggaaaataagatcaaaagtaaccgagcgcggcgaaaatgaaggtcgagactacaacggccgaagtgcttcttttatgaagaagaaagcgatgaacgttctaaaaatggaattgtcgtgtttccctcgcttgactgcatgttcattaatttcaaggtcttgacttgggcatgggagatcgggactcacgatgcgaaataaacgcagcaccaatgcaagcaattgaagaggatagaaggaaatcacgtaaagaaccaaaaaaaagcgaggcgctttgagattgcggaaaagcgggaagtataggtgaagtgagaaagagttctcggttctgatggcgcggagagggagatgtggagggtttgagagaaagatgagaaagatcgagaaaatgtgggtctaggaagatgaacagtgaggcgtggagagtcaggtagaaaatggggaaacaaaaaacgagatggaatgaagctgtgggaatttgccttcgaagaaaagaacttccttcacttcgactccgtgcgggtttcgcgtggccttggcgggtggccaccgcccggcagaattcatagtacagctttagtgtacaaagatatattattagggatttctatccatatagatggggtcgaggaaagttttcatgatgactcaagatacgtgacagtcagacagggaaaataagagaaaacaaaatgccagatccgagagttgatactcaaatcatgcgcatctcatcaagtcaaaacgccacaaactgatccgaaaaaaaagaaagaggggtatgataggacatgaaagggtgactgtaaaaaagaaacagcaatcataagagccgcgtcgatagaggctcggatgttgggacgaggaaaaaaaaagaagcagagataaggaacaagacacaagcgaacgatcagagatggccaactatgcagcgtacacagcatatggcaagccttatgtctcctaatgtaccgtcaccatcagggctaatcagttcgcacctcagtcttctcggagagaggcttgcgcatgacagcgtcttggctagtcatcctccgacctagagcgcgctcgaccttagccccgagagcgagtttgttcaggttgtccgacttctcctccgtggggacaaatcgctgcttattgagaggcttgctctcgaggcgaccgaaaccgtcatggaggtgatagatgtcagcgattctggggtcgccgttgagggtagtgctgtcggaggcagccagcgaggggcttccactgacagtggagaatcgctttgagtttcggttctgcagcagattagacttgcggggttctcaataaataaagcaaaggccctacagcggacagaacatgtggaggggaagagaaggggattcctaccgattgggccatgatgggacgctcagagtcgagagagggttggcgggccatttctggggggaatgatacggttataaagaggaggatttgcgccgaaagaggggcgggatttcaaatggtaggtataggaaggcctgaaatggaatgcagactgcaggattgggctattagcgggtgtattattgcctagtggctgggcgatcttgaatttccaagggatacatactcaatccgggtactccgtcaaaggggatgtgttggaatcaggtgcagaagtaccaatgcagtgcaagagtagaaatagagtcacagaaaggagaagacggggtggagtcaaagtggttaagtggtggggaaagacaaaatgtgtggcggaaaaggggaagggattttatggaaagatcgacgtaatcgtaagatgtgcagtaaagagtctgcaatgaaactccaaggtggatatgtgattatacaaataagaaatgacctcgggattcaatctcccttctctgatgtcaattaaaagctttaccgggaatattttgccacgtgctggccacgcgagccgatcatttcggcgggtacggagtactcagtgatatacactttgtttctactccgtatgaagattagtattgtatattgtaatatgagggtatcaggataagatgagaatgaaagacttggattacttgcgagtttctatctcctataacatatgtcgtattggcagcaagaggcaacatcttggtctctatctctgtatatagtatgtaccattttacaaagacaaagagctggcaacacagagccccaacagagccccttttacaacaggtaaccataataccacatgcaaaacccaaaaaaatgatgaaacaagcccgtttaccctaacagtccaactatctagtcttggcaaactatgcagatcacgaagcaccaggatgctttgagagtctatagttcgagaagtcttgaaagaagtcttgaactactacattaacaagtaataaatgtcaaacctatcagaattgttacatgaagttgacgtgaaagcaacgaacacacttatactccatcacacaccgcacagattctgccggatttacttccaatttcaaggtgcaaagccatctctgtcgatcctcattcaattcaatcaacagcgtcccgcagaaatggccaagccaaaatcctttctcagggagacaaagtcgaagaagaagtctgcctcaaaacaggtatgcagtagcaatataccccgcacagaacagcttggtcatgatctcatacattttgatataggtacctgtgactgcagatgattttcttgcaggtgtgtgtctgaaccccaataagccaataatatcaatggtcaaaaattaactattctccagccggcgtcgagctagaagaagccggcgagaaatggcgggccggagatgcggccaagtctatgcgcttctttatgcgggccatcaccaactatgacgaaggactacaaaaacatcccggcacatttgatttagcttacaacaagtatgtaaacaagccattattttgaattttgcatttttcaaatctcatccatgattgaagagtattggtttgggtttacctttactaacacacgacctagagcacgagtccaatatgaaatcacccagcaccccaaattagcagcccagttgccagcaccacagggggagatcttgcagattgcactgcagtcacaccgggatgcgttggccctggagcaggacaatgctgacgtgttgttcaattcgggccaggtgctgaccagcttggcggagttaatatctaacctgaagcatcccgacgaggagcagcagatgcaggcaggcacctatttgcaagaggcaatcgagctgttccagcggtgtctaatggtacaggagatgaagtacacggaaatgcaagaggagatcgaaatgatggaatccggggatgtgccaccggagccggaggctgtaccaccggccgcgggacagtccaaagccgagtccgcaggtgaggagcaagaacagtgggcgatgattgtggagcccgtcacgaagaatacgctagtggacactgcggtggcgcagctggagactttgaccactctgtgcaacttgttgacttctaaccccagtgcgggcggtgttggttgggtgcaagagtactcgtcggagctggtgcagtcgcgactgcctgcttatgccgaaggttcggacagacagtacgaggcggccttggcgcgggccaagttcatctgtgccttgaacgatttgctctaccgaggcggacacaccgatatccaaacctaccagcaagaggtcggacaggtctttggtccagagctggatgtatcagcggaccctgatggactgtgtagcaaagcagatgcgctcacatcgttgaaccaggcactttcggatatccccccaccagaggatgacgagatgtttgagaacgcggtagcattgcgttggaagtcgctttcaaccgctttggacgcattaacggctgctaccaagctcccggatgccgacaacctgtccaagattcaccttggtcgcggagacgtcgagatgcacagatggcgtcttggtcgagcaccctggaaccacgccacggcgaagcagaacggagctatgctcctgcgcaacgcccagacgtactaccgcggagcaacagctctggctcgccgcgacggagcggccgaggaagaacgcgatggaacgtgtaaggaggcgattgctgcggcgattgaaggccagaatacgaaactcgagcagctcaagtcaacggacctccaacaggtgatagtcgtggcccaggatatggtggaagacggtatggtcgacggcagggaactgagtgccctgatttcatcatgaagcggacagagaaacaatttccgcaatatgctcacagacccgggtgggcttttgcctcctcgtccatctggatcgcatcctggcgaatgtgatgttgtctgctaaattgcgtggccgctgtagcagcaccctcaatatccgaaacaaccaatccaagatgcgacaatagccgctcaatttccagcctctgcgcctgcacagtctgcgcaagctccgcgttttccgcatgagtagcctcgagtctggcgttgagggtcgactgcgcttcttgcaaataaggcgtaaggtgcgccctgtacagatcttcagcgccgagtgtatgcgcgctgtgtagtaaataaaattagaagccagaacaaaaaaacaaaacaaacatagtccgaataaacggcaaaacgccccaatgcattcaacatacactgttctctcttgaccctcagcaattcccccctcctgctccctcctagctctcgcatccccaacaagccgatcaagctcatttaaatgcgacaccgcgtccctttccgcgacaatatcatcaaactcagccttcgcattcgcttccagcttcgcgttcagttgccgccagacaccctccaagctagcaggaacatggcgcgcaggtgtcggaaaacagcctgcaaagttcgcatatgaattggcacggagtgtacgcgctagagcctgctcgaagacttggtttagacgtgaggcgcgcgggcctggggattgggggattggagctggcgggggaggggatggcgacgccgcgggcggttggtgggaatttgattcgaccatggtgggtatctctgctttcggggtagagtcgaagagtgagaagtaatggagagcatgcgggtatggcgagggttggcgtgcagaaggccgtttctccaggaatttggatctggggtgttggactctgttcaacgcgacacgccggtcacgtgtttctatagattgaattggtggcttcgtacgttacagcgatagtatttggaaaactttaattttcatactctgtgaaatgctacatagtatgcgattatatcaattctataaagtagtgcagcagatggtatacttggaagaaaattcagctaccgaccaactcctagccctaacttaatggatctaggcccaaccaactccggcgtctgttctcctcattctcggctttcaccaaaagagcaggactcgggctttgagagtctttccgtagattgaaagattgtatattcgtcgccgaacgggatatgcgccacgagcatacgcgtctatagaggtcagaccaaagtaatttgaatgcgggccatgagatagagacgtatataaggctgttccaaaatccctggaggggaaggacaaagctagatgcatagttcagactaaaattaaagttgttaggacgagccagggaatagactctgtttatcgttgaggggacctgcagtgtcgaacaatcaacacaaagaaccgacagcagtttttagattataatgggcttcaattagacctacccatgtaacaagcaatgcaatgaagaacagcatagcgtattttgtatatgcccacgttgctgaactagcttctgtggacgtcgacctccgctgtgagtctgccccatccggccgcccagtcttgccaaaattctcctgctgaagagggctggaatcggtttttgagctggacttttgaagcgtgttggctgtactaccgccctcgatcgtgaccgagtatgctctgaacgcattagacggcaacccgctcgcgtcgccctccgacaaggaccggcgctctggagtgaaacaggcaatctccctggtaacttgaatgccagtcaacatagcaaagggagattctgggacaagatctgagtcaatgccgccgaggttccgaagctggcgccgtttctggtaaatcaccgtccctgctcgtaaatagatggcgaaggtcaatgagataatgagccagactggtccgtagaagatagcgatgcggaggaaggaccactgtacagagatccagcaccagagctgtcggtggatgattggattagcatagggtgatagaagggaggactttggggttctgctcacgagggcggagccatatattcggccccgagcttgggtctggatgaagaagtatgcgaaagctgggacgaatggaacaccgtaacagcagagcacatatttccattcgagccgacgtagttgctccgagtcgtatttgtggaagaatgttaggtaaacattgcatgccattgcaaaagtccatagtgcatcggcgggcatgaacctatgcatccttgcttattagtggccatctgctaatggtgttagttccgatttgatacgaaccattgaatcaaaaacccttgaaactggcacagggaactatcaaccccagaatgaatcccgtctgccgatatgatggtggctatattagccatcatgttaccccatgatgcatagaacaccaagcggttgatgggtttacggaatgtgggggaccaaataaaagtagcgactataacgaaagtgccaacaagggagacagtcgagcaaacacgctctgtagccgagatggctaatatttgttgttctgacagcgtcatggtacatggtctatgacctagtcgtcgcgaaaaggggagggcgtccagctcctgaaggttatagattatatccactgcagatatgaaccgagaagatccccgtggttcaacaaagccaagttagcttgtgacaaatcgaggatgcagatgaccgtagacttaccagcgggggacttattttcgggttggggttaacccttgaaatagaaggcaaacggttcgagtaaatatgcccagagcacaataccacctgcttattatccgcaacgggcaacaaaggaaaaaggcaaatgacaaatgaggcaagaccaggccaatcaggatatttctggttatttctttcggcttatagctaggaagatgaccttgtgccgagtcatgcaacaaaggacgcagtcccaacagtattaggttcgaacaactgccaagaaacggagtaagaaccaagcaggacatcttttaaatgttttcctcatttcaaataccgcatgggccagggctcaagccggtactcctagggaaggacatgcgaacgattccagtgtgatggtaccacaacgtgcaatctcccagaattcacggaatagataggagattggacaagggatgagtgctggtctgcatagaaaagcctcggaggcatagcccttggggttgcaccaatgattagagtcattgtttaggcgtgcagcctttgtccccgccgctattggggttcgacagtgcttgaaggggtgaagttacctgaatatgtcaagggttacagcggggacgatatttgaggggccttgtgagatcctagagtcagttcgcccatgtgtgacactagcacaactgtttccccccgacgttctcacagctcattagtcgttgtagaagaccagattgaaagacgggtgactgcatgtttgaaagatttttgcgaacaagcaagcataaaggaattcaaacgccaacggaatgcctgaaagggttgctcttaagtacttatggttgggtacttggaataaggcgcagtacagcagctatgagctcgctcgtcccgaaaatccttggccggtggacaaagaaccagttgcagcaacatgacaagatattcccgaggattgcagttccagcggggaaatttgaactaggcccaagtgcttgttgcacacatctcgctgtgtgtgttaataaatacagattggggtggatgacagaatgcatttctcgaggaatagctattgctatttagaagacgacaggcagaaggctgacaaaatctggagcgctgctccagaacattatcaagacaacagacagtgccccgaagtcaattcatctccaattaggccatatactcctcatctttgacaaaactggcccaaaatccgcaatatcaagttgtttttttttaaaaaaaaaagaaaaaaagagacgcaaaaatatccatcatcgggtataacgccgaattctcccatgtccaattgtccaatcgagctcgtcatctcgtcatgcgcaggctagaccgctaataagcgggctgcggggggatcatgcctccatatccagccatctgctgttgctggtgttgctgctgcaatttagcctggatctgaggcaaatcatggaaccacgggtgctgcagagcctcgttggcgctgatgcgcatctccggacggagttggagcatacggtttaacagatccatcccgatagcatccatttgagggatgatcagcgaaagatcctgcgtggcgtagatttggaaatcggacttgtattctggcaactgcgagatgccgggccatgtccgctcggatggtgtacccatcagacggaagatcttgaccaattgatcctcgttagttgtgccggggaaaagcggacggcccgtgtacatctctgccatgatgcagccagcggaccagatgtcaatgctggtgttgtaggtgcgacttccgaggaggacgtccggtgcgcggtaccacagagtgactacttcgttggagaaggtattgaccgggatgccgaatgcgcgggcaagtccaaagtcacccagcttgagctgacccttcttgttgattaggaggttctgtggcttcagatcgcggtggaggactcggttgtcatgacagaaagcgatgcccttgagtagttggtgcatgaaagatttgactgtggcaggatccagctgtccacgatcaccgcgagtgtccatatatctcttcaaatctctgtccataaactcaaaaacaagcataagtttgttttccgtgtggatgacatcgtatagcgagacaatactctcatgcttcagctccttcatgagtgagatctcacggattgcagtcgacggtgttccctcctccgaatccaagtggatttccttcagcgctaccatttcaccggtttggcgattgcgccctttaaagacctgtagtattctgcatcagcggtgagcgggggagaggcgatcatgctaggagccgggggagatgaggggagagagatcgagagagattgagacgtacggtagcatatgtgccttcaccgagctaaagataagacgaatactcgttagtgaagattccagacccgataatgaggggaaaggcataccttttccagctgctggaaggagctgggctgctgagtcttgtccattttttgtggaactttggaagccggtggccccgatggtttgggtttagaatgaaagagaaagtgaccaggggataccagatttgaggcgatctttaaagggtgggcaggatccctgaagtgctccatgctgagacgtgagggaggagccccgcgctgagtggcccgggacttgtcatagttggcccttttcttttggcctgagttggcaggcgcttattatttctacactgattttggtttctattgttgctataactggtacattgtttataatttgtttttagaatgtcctcttgttattttctaaatctataaattggctggaagttgggatacaacggtcggaaggactgactggcatggatggctacaccggacatgaggagtaggttcatgcccaagatttccaaaaagcagggcttcgttcctcacgccaccaacattgacaataccaatcggcatgcctcgtttgtgtgctcgttccactaggcgccacgccgagaaagtcgccaggctgctacctaggatgagtagccgcccagcatcgtcgatcgcttcttcagccgctgtcttcaccagtggatcgatattttcaccaaacatgatcactgccggtttcaaaatgccggcgtttgaagtcgccgataatgccccgtcactctctacctctacaatcgcctttgtgccatcgcgcagcgtgggaggattctccaagcatgtcggacatggaggataacggaaggtagaatatggcgcttcagcgaggtcaacgtcgccatccgggttgagcttcaagcctttccgccgttgctcttccggattatcggtatcgagcgcaccctctgcaaccatacgagccaaaaactccgcccaagctggattaagtttctccagcgacgcttgaaagtcggcgcggggaagttggttttgacagcttacgcagacgaccgatcgcaagtatccgtgtagttcgagggtagacagttcgggatgcgcgagggaatgaaacgagtcgacattctgcgttacaacggaactgatgtaccctttttcaccgagacctttaattgcccaatgagtcgaattcggctttgctttcagaagcccgggccagccaacgaagctgcgcgcccaataccgcttgcgtgactcatggtgggagatgaactcgtggtagtaaatcggacggtaagatttgtttcgccggtaggtaccttggtcgcctcgataatctgacagaccagacgcgacggagatacctgcaccagtcagcagtactgtctgggaatgtctccccacatcgacgccgcggagatttaaggacggtggcgcagtgaagaaagtgttgatagcatcaattgcccctgcaagtgtcgttgcagcccgaggtgttataatagcaggcggcaatggtcccgtgaaagggatccgaatagcaggcgtcgtcattgaagaccatcatatgttcaccgatgtcttggcggaacggggagtggaggttctccaacaatggcgtagttgcttggcggacacgaaggtattgtcaaagattaaattaaagtaatctgaaggataaataaggaatctgataggctccgggttggtagtccggtttgaggggatcaataggagtcatggagatggtcatggggagaaatgcaaacgtgcagattggattggaaacggaaaattccagggaatagccggatgacatgaacatcccacttacacctgggcaaactcatctttcaggcggattagatgtaacttgtacggaaatccctgtctttactacataaagacccctgaaaagaacactctgtccaatcctttgtgctcgcgtgccttcgacgcgatgccactgacgcagcccctatgcaggctcaggcttcgccctctccacttaaggatctccagtctcacatcacttactgcccagcggcgtatacttacatccactccttttttaaaagacgcttcttcctttatttttcactccagacctcgttccatcccacgagcggcaacacctctcgctatgacacaaactagggatcatggccatagccacggccccggtcaccaccacgacaatacctacctcacttccacaaacaaacgcgacgctggtgttcgcatcacacggattggtctcgttgctaatctgtgcatggccattggaaaattcgttggtggctatgtctttcactctcaatccctcatcgccgacgcataccacgcgctcaccgatcttgtctccgactttttgacgctgggaactgtcgcctggtctctgaagcccccgagcgaacgattccccaatggatatggaaaaatcgagagcatcggtgcgctaggagttagtgggctcctgctctgtggaggagtgttcatgggtctcaacgcgggacaggtcctactagctcatttctaccccgaggtggctgaaacagtagctcactccgggattttgggacatggtcattcgcacagtcatgggccaatcggtcctagcatccacgcagcgtggatcgcaggaggttcgattgtggtcaaggagtggctttaccgtgctagtaagtaaagcgatatagggtgtatgagtgtttgttatccatcaggtgactaactttattccagccatgaaggttgccaaagagcgcaagtcctccgtgcttgcatctaacgccgttcaccaccgcgtcgactccctaacgagtatcgtcgcccttgtcacaatcggaggaagctatgtcttccaagacgccacctggctggatccagttggcggggtcctgatctccttgatggtcatcaaagccggttggggcaacacatgtacctcccttttagagttggcggatactacggttgatgaggaagtccgacactccgtggaggatgctgcctccttggcattgaaggatatccaggatggacacgaggtgatcgttcgggatgtgcagggcctgaaatccggccaaaactacctaatggacattgagttggctgtgccgggggcctggcctattagtcggtcacaacacattgaagaggtcgttcgccacgccgttggatctggagttcgtggcgtgaagcgcatcaaggtccgctttattcctgcggaacatcaggacctcacgttctcggatgagtttgttgcacaagatgttagtggtgatccagagacactccaagatacccggaagcggcaatagggatgtaattctgcaatgatacccttggatgcgggatctatgtctataaatcgaatatagaacaagttcataatactaaacagagtacggagtacaaagtaagtatattgtactacagagtataaagtgtatagtatagtggggtaattctattctaccgagaatttagcagagcaacagctcaaaagagctatttacccggcaaaacctgctcgggctggacttgacattcctggagaatccatcaatctgacctaattggccctcggtgctcacttgccactttccaattgtccgctgtaccctgtggttatcgaagacataagaggatgcataaagtccaccgggaccggttatagtccttttacatcatcggtccatcccacctacacttcttttcccggactcaccccttgatcattgaattacattacatatcttcgcctaaatctggaagaatctcactttatctttcctgtcactctatcgcctggtattgtatctcttcggtcatggcgtccgatggccccctctacattggattcgatctctcaacgcagcaattgaaaggattagttgtcaactccgatcttaaagtggtctgcattgccaaattcgacttcgatgccgactcgcatgggttcccgatcaaaaaaggcgttctgaccaatgaagccgaacatgaggtgtttgccccggtcgctttgtggctgcaggcgttggacggtgtactagaaagtctgcgcaagcaggggctcgatttccgccgtgtgcaaggaattagtggtgcaggacagcagcacggaagtgtatactggggtcataatgcggagtcgcttctccgcaatctagattctagcaagtccctggagacacagctggaaggcgctttctcccacccatacagtcccaattggcaagactcgagcacccagaaagaatgtgatgagtttgatgcagctctcggcaagcccgaagatttggcgcaagccaccggaagcaaagcgcaccatgtaagagaagcatcacagtcttaagtataggcggggcaagcgtgctgacactgtcgtcagagattcacaggtcctcaaatcctccggttcacacggaaataccccgagatttatgagaagacctcgagaatctcattggtgtcatctttcttggcatcccttttcctcggccatgtcgccccattcgatatctccgacgtgtgcgggatgaacttgtggaacattcagaaaggggagtacgacgagcgcctgattcagctgtgctctggtgtttttggaggcgaggatctcaagaagaagctcggcgaggtaccggaagatggaggcctgcacctgggcccggtccatccatatttcgtggagcgtttcggctttagtcccgattgtacggttattccagcaactggtgataacccggcgaccatccttgcgctgccactactgccatcagatgcaatggtttcgctcggcacgtctactaccttcctcatgtccacccccagctacaaaccggatccggccacccacttcttcaaccaccctactacacctggcttgtacatgttcatgctgtgctataagaacggtggcctggcccgtgagcacgtccgggacgcaatcaatgaaagcctgaaggatacccctgcccaaccctgggccaactttgacaaggttgcgctgcagactcccccattgggccaacggagcccatcgggcctgatgaagatgggcctgttcttcccgcgacacgagattgtcccgaacatccgtaagggccaatggcgttttacatacgatgccaacaccggaattctacaagagacgaccgatggatggaactcaccgcaggacgaagcccgcgccatcgtcgagagccagtttctttcactgcgcttgcggtctcgagaccttacccagagcccaggaggtggaattccctcacagccacgccgagtttatctcgttggtggaggatctaagaataaggcaattgccaaaattgctggcgagattctcggcggtgttgagggtgtatactcgcttgatgtcagcgacaatgcctgcgccctgggtgccgcatacaaggctgtttggggtatcgagcgagagcccggccaaacatttgagagcctgatcgggcagcgatggaacgaggatgatttcattgagaaaattgcggatgggtatcaaaaggggttgtttgaacagtacggcctggccgtcgagggctttgcgcagatggaaaagcaggttttgcagcaagaggctgacaaggccaatgcagctgcaaattgaaactactatagacataaaaaaatgggagtataatttatttagcatcagtttagctattttcaagcctcatatagcaagggaaatagtacatatagtacgatgttttaacaacaaagctcccgcccaaaaacaacttcgtgcaagccccttgccctatttagaaaaacgccaagaacatcacatttgaatcaaaatctccatatctctactcgaaatacgttggacattggatttgaagacctgccactctcttggcaagcgaaggcggaacttggtgcacgggaccgattacgacatccagtttgaatgtctgcaggtgatatctcctccaccgaaaacaattttaaaacaacacacacctcccctacgttttgatttccctctctccttcccacaccttgaagggagactggaagatggaagaacaggtgagtctcccaattttgttgagcaccctcaaaaaccaaaaaaaattccaataccccaacaccgcccctcccccgccgtttcaaacaacctctccgatacctttccctcaactcaagacacaagatcattgacacatcctaggtagcaaatgcaattgagatcgcctggaatccatcctccgacccagccctaaagtcgcaagcttacgaataccttaaccaactccgctctgacccctccggatggcaggtttgcctctccctcttcaccaaaaccccacaacagcccgaagtcgtacggcatgtcagtctggagattgtcaatagtgctgcccaggtcggtttgatcgatccggcctcgctcggtgtcgttcgagatagtgtgctagcctacattcgccaggtctacggcccggaggccactgccacccccgatcctccttacatccagaataaaattgcacagaccgttactttcctcttctcctccctctatgcgaacggctgggagacttgtattgacgatctactgagcctgaccaacaaatccgcgggccgggataaccaaatcggcgttgttttttacctgcgtgtgctgagttcaattcacgaggagattggcgatgtgctggtttctagatcccgcggggaacaggataaggcgaatgcgctgaaggacctgatccgtgagcgggacatgcagaaaattgccaactcctggcaggagattttggcggtctggcgggaaggtgatgatgtgattgtcgagatgtgcttgaaggcggttggtagttgggttagctggatcgatattggtcttgtcgtgaaccagaccatgttagacctgctgttccagcagcttggacgggccgagaaacaggagcttcgggagggagaacagcgggtgcgtgatgcggccgtggatgtcttcaccgaaatcattggcaagaagatgaaaccttcagacaaaattgagatgatcgctttcttgaacctcgactccatcatcacgcagctgtctaacagctctccactacgggagagccgattcacatccaagtacgatactgatttggcggagacggttgccaagcttgtcaacaacacagtcgtggatattgtgcgggtattggataatgatgctggtcccgtcaaggagcaggcagaaaaccttctgcaggtcttcctgcctcacattctgcgattcttctcagacgagtacgacgaagtctgttcgactgttattccttgcgtcaacgatatgctcacctacgtccggaaactcgcaaaggcgaacccatccttcgaacagcgaaacaagtccatcctgcttccgattttgaaggcaatcattgcaaaaatgcggtacgacgagacctcaaactggggcgaggaggacgagcagacagatgaggcagagttccaagacctgcgcaaaagactaggtgtcttgcagcaaatcatcgcatcggctgatgagcagcttttcatcgatgcgatctcagaggtggtaggaacaactttccaaaaactgcgggcatccggtgggcagctcgattggcgtgacctagatctcgctttgcacgagatgttcctgtttggcgatctggccgtcagaggtggcagtctctacctgaagggcgcgcctactaacatggctgcgaaccgtctcatcgagatgatgcttgcgatggtagagtccgatatccgatcattcacccacccggcgacccaacttcaatacatggagatatgtgttcgttatagctcgttcttcactcaccatactcatctcatccccggagttctggagagcttcctccagcttgtgcaccaccctgttcgaaaagtcaagactcgttcatggtatctcttccagcggttagctagacagctgcgcagccaaattggcaacgtagcacaaactgttgtggaggcattgagtgacttgttggttatccaggccgaggtgccttcagagggcgatgacgctgatgagatgtcttccgaggaccacgagggctccgcggacgccgtgttcaacagtcagctgtaccttttcgagtcagttggaataatttcctcgaccccaagtgttagcgcagataagcaggttctctacgcccagtcggtaatgaaccctgtctttaacgatatggaacgtaacctcgaagcggccaaggccaatgacgaacgtgcattgctgcagattcaccacgatatcatggccctaggaaccctcgcccgtggttactcggattggcagccgggcaccagctcacccgcagctctgcccgtgcctgaggtctcggcggctttcgcccaggttgctgaagcgaccttggttgcacttgagtctctcagttcttcattcaatatccgaactgctgctcgctttgcgttctcgcggctcattggtgttctgggcgcgcagattctccctcaactgccccgatggatcgatggactcttgactcagacttcgtcacgagacgagatggccctgttcctccgccttttagatcaggtcatctttggattcaagggtgagatatatagtatcctcgacacgctcctgactcccttcttgcagagagtcttctctggcattgccgatccgacaaccggcactgatgacgagatccaacttgccgagttgaagcgagagtacctgaacttcttgctggctgtactaaacaatgatttgggaactgtaatcattagcgaaaggaaccagcccatcttcgagaccgtcatcaccaccatcgaacacttcgctaaagatatcgacgacttcacaaccgccaagatggcgttctctgtcttgggccgtatggcaagctgctggggtggacctgatattgcccctgcccctgccaatggcaccgcacctgcccaagccgcactccccggctttggtggattcatgatcacccggttctcgcctttgtgttgggcactgcccacgacaccatccttcaactccaaagatgcacaagctaagcaggtccttgccgaggccggcgctttgcaacgcactatctactccaagacaggcatggaatatgcggaatacttgcgcagccaggaattgcccggcatgggcatgggggccgacctcatcgaagagttcctgaccgctatgaaccagctggacgtgaaagggttccggcaattcttcccggtatgtgctaatgccttaatacttccaacgctttcgatctacgtggcatccaactaattcatatgcaattgccaacagtcattcatccaacgattgagcgcatgaagtttcctttcctcctctctatctgctttctagattcccccatccattttccatatttacgttctgacgcgacgaggtgacgtctgtcctcatgtcgccctgtgacttcaatcttctataccatctacatcatcccacccaagcatcccgatcccgataccttacttgcccaacttgaaccccaagaatagtgctggatcaaactctcgggggcaaatcagaaagaacaaaagaatttacctgattttcaaaagttccgagtatatagcttgcttcttgcttttcattgatctcttttgctcatggtgcattcgcattgtggtgttcatttgtatcccccgacaaccacttcacggcgtatcctttttatctgccccccctctctcttgtcggctttataggataagaccgaaaggggcttattttttctcgtgtcttgtgttgaatcactttcaactttaatggtgtgaactggagtaggtagatcatgaaatgaagtggtagagttgcctcaataagctcaacagagtattgactacaagaagcttagaatggattgctacgtacaatatagtaacctgatctgtttccaaccttggagaagacaagtcaccattcggtcatctccactacaatcctgctactccccacgatgtaacccttctttcggttctacctactagcctggaggccaaaaagtatgatatgctcagaaaatgtgctgcctattaagaaatgtaactctaggataagccacaatatgaacggatggcgatctagggccagtctcttgttatacaaggcagacatatctaggaggctagtagctctatgctgtatctgagatgcaggatctgagggattctccgctaaacgtcaatcaccttccgatttatgatgtactccacactccgtacaagcatctgcattgggagcagaatttgattctggactggcttttgtattagtatagtgcacatgactatatttgtggtttaccacatcaaaacttgaatacctgagactaaagaagtgcaggtggagtcggcattaatcttgcatccttgtatgaagaattctttagggttagcgattggacaaccccaattgtttggtataattagagattgactaaagttctcgacagatgggacgatcgaagagatagatttgtaaatctagagctacctataacgtaatatagagtagaaaatcgcttgagaagttgcatagttatccattccatgcatgccctatcccaagcccaatatctcatgcagctagcaaaaatccctcaaaaacagcttgtaagttggtaaactaatttatatccctgtctagacccactgggggccatttttctcatctgttattcgcctctccttcatctcgagagatctaaacctccaaaccatcagtgtaaaaacgacagacttccggtttcccctccagaaatatttaagcaatgcctactttggttaatcgcatattcgaaatagctcgcttctgttgcctatctggtctcattattttcaacggcctctactgctatgttgtttccgaagagtgtgctgatcacggcactttgctatctttcaacttcatcgctggcctctaccttgccttcatctatccaagggcagccagttccagacaagtggttccaaatctcgctcaatgagagcacttctgggaataccagccccagtacaaggaacatcgacaatgctcttgtggaacgaactcccatccaggtctgcgagcgtatcattaccgcgaccgctgcctgcactgtgatcgcaggttatgtgatttcatttgcaaatcgatgggagccacaatcaaggagctctccaatcagggcaactgcaatctcatgcgtggcagctatcagaacctcagatggacataccaatcttccggccgaaactgcgatactacagcacagcaggcaaccatttctggcgccatcaagaaatacatgaccaacgtggaacacaacaaaatctgcggcacttgcctttcttccttatgtttcttccatagaacttctgtcatgtttgagctatggaaaatgctgtgatgcttaggcctcatgtgatagtattccctgcaagcttcccgatatttgtctctagttatacatccctggttatatattgaaaatccggctgcacattctaagccttttcccgctttgtttcgccatctagttatgaaaccgagaaaggagagaaaatgccaagagacatcaaagaccaccaaaaagacacgataaagccacttatgccgccgactacccttgtagtttccacaagatagaaggtttcttcctctttcaagtgccctatagctatcgggaacactccgtacaatcactcgtgttcttgggtgtatgtaccttattaatcattgggataaaaatagcatcagttatcgtgctagtggttgtgtcaaaaactgtctaaatcttctttagccttccaacattcacatccatcaaagtcttcgaatacattgacgtttcatggctcagaattgcttgaccggcgcttgcctctgcaagaacatagcataccgtattacgttgcccgcgtcagaatcaccccctaaggtatagtttatctccaacttgcccaatcagcaaatcccattcgcttactgacaatctcgccaggtgatcatctgtcactacaccaattgcaaacgctatacgggctccagcttctctgccaatatcatcgtgccacaatctagtttgcagcacatcaaggggtcacccaagttgtattcggatcgtagcaacaaggacacgcaggtattgcgcgagctctgccctgattgcggtacgccattcacatcacgatcaagcgatgatcaagaagtcattgcggtgaagtcgaggacactcgatgaagaacaccgacttaactgtgcgaagttggcaatggaaatctactaccatcgaaaggataaatgggtggacgagatccctcctgcttctgccctaacagcgagttcaccagcgaagtcagttcctgcatccaagcctagtgtgcctccaagtccgatccaatccgccctctcctacttcaccggctatcagcgagcttctgagggttggctcgagaaagtcaatcgcgccttccttatatcgaccaggtcgcactttccattgtaagtaagcccaggtaaataaaagtagcatcgaacactcatgtaaactcttcttctttttgatctccgtcagaatttatctcaatctttacgacatgtcttttcccagaatttataatttctttgcgcagaaatgtgtgccggtgaccggcaatctctcagcgattgtcggtagtgccatcgccgttgcaacgtggagggctaagctcgcagaagaccgagctaaagccaaagagacagacaatccccctccacacggagtgaagtaatcttgctcgtcaagattaccgggcgcttgctggatgggcaactccagcgtgtgcttgctattgaagacggttgcagtgtccattggacctgtctccgacggatatagctcctccctcggcttaatgacataggggctggattctagagctctgtctctacagactgacagtgggtttgttcacgcagctccactggcagtctggatcgagtgcttgcacatacttcgttgtcctgcgccccttttttttatatatatctatagcccctcttgctgaccgagggtgcatttattaaagaaaacaaaaaaaggtccacgcggttgggtggttaggttgggcctgggacaatcttgctttcattttcgctgtgagtacttccaaatggatgccctgttgctgctgactgacagtgggttggttgagcattgctcgcatttcttgtgacagtctgggacacgaaggtggaagaacccgaagtgtcggtgtttcactgggcaggtggtctcggtcccgtaagtcataacggtggtagtggcaccctcaggagtggtgggtgtggagttggcgccaacgcttgatcagacggcactggtgacagcgggccccataggagcagttgtggcagcgaccagagggagccggggtgcttccagcagcgatagagctgaaaatgtttgaagtggaggtcagggtaacagttgaaaccgtgctggatgtacgtcggatcggtactgtgagtgctgttggagtagggaaggcactataggtaactataacttcgaagttttctacggcaaaggaaataaaactctagttagcatgtcaattgactgatgatgtgagcatttttgttatggtacacatttgggacctaccagctccaaaggtgactggtcccgagaaaaaagaaagaaaaaacacgcctgcatcaagggaaataaggaacgaaaaaggaacagtatcaaccccggtttaccaggcctcggtgtcgaagttctcaacgccgaagtatgaggcaacaactgtacggtcagagaacttgcgacccgccagcgctttgagagcggtggtggcggattcagcggtatcgtacttaatgaagattttaccagcgccgtgtccacggcgggggggcttcatcccccgaaacttttccnnnnnnnnnnnnnnnnnnnnnnnnnnnnnnnnnnnnnnnnnnnnnnnnnnnnnnnnnnnnnnnnnnnnnnnnnnnnnnnnnnnnnnnnnnnnnnnnnnnnnnnnnnnnnnnnnnnnnnnnnnnnnnnnnnnnnnnnnnnnnnnnnnnnnnnnnnnnnnnnnnnnnnnnnnnnnnnnnnnnnnnnnnnnnnnnnnnnnnnnnnnnnnnnnnnnnnnnnnnnnnnnnnnnnnnnnnnnnnnnnnnnnnnnnnnnnnnnnnnnnnnnnnnnnnnnnnnnnnnnnnnnnnnnnnnnnnnnnnnnnnnnnnnnnnnnnnnnnnnnnnnnnnnnnnnnnnnnnnnnnnnnnnnnnnnnnnnnnnnnnnnnnnnnnnnnnaatgaagattttaccagcgccgtgtccacggcgggggatcttcatcccgagaatctttccgaacttggcgcattcctcgctcacatcctccatgatttcttcgtaatcttcgtcattgaggagctcgtcaagcgtgaccatgttgagaagctgcaggacctgggtggtctctagatcctgggaggtcgtcttggcgaacatctgcatggcattcacgcccatgtcgaggccagaggcttgtgtggttccaacgctggcgagagcaaacttaaggtggtgatcgactagttccatgccgttcaaaccttcaacggcaagcgcagtgttgttcgggtcgacgtattcataaaaggcaattccctggaaaagttagaaagaatttgacggtagggaaatactcaacttacccgagactcctctgtagcagcatccttgaccaagacaaatgacttaaggtcgccgaatgacttgagcaacatgataatagcttcctcgttgatgtaggttggaatattagagatgcagatcttgttgggtgagtcaggcacctcgctcagaacgacgtccggctgtactggctgcgatgcgctcccgtcgggaacaatgtagtcctttggccgtcgcacttcaagtcccttgtctccactctccgccatggtaattccatcgaaagccaatgcgactgtggcgtcatttggatccttgaactccaggagcgcgaatgttttatcttcagaaacttgggcagagatgcagggatcgacattgtgaataacattgagtccattcaattgaagattgaagaaggtaataacggcatcgcccgagacaccggacgggatgttgtaaacgaaaagacgctttgattgacgagagttagaaggcttgagggcagcattgtcgctatcgccagtgggagggttcaggaagtccttcatgcggctggggtccatcggctgctgacgaggagctccgggaagagggaacatccctgttgatgttagacggttccactagctcataagctttaaacacatacctgagatctttgcctgttcagccgtaacattctcataaccaggaggcttcatgtcccattgagtcaaacgacgtttacgggtcaacaccgagggcacatctgtcaaatcgggggtaggctccttgcgccgcgggggcgtggcgcttcgcttgcggtctcttctctcacggtctccacggtcaccacggtcaccgccaccacgtccaccgcgtcggtcgtcaaacaagtcgcgacggggtctttcgtcaaagtcacgtcgacgaccaccaccgcgatctccaccaccacggtcaccacccccacgatcaccaccaccacggtcaccacccccacgctcagcgcggtcacctcgctcggcacggtcgccacggtcccactctcgatcatcacggcggccagagtagcggtcttcgcgctcacgggcacggtagtcacggctggttgagtacgagttcacttcgcgctcccgacgagatccatgatgaggcgaacgcgaacggcgtcgttcaccgcgatcactcctatcgccccgttcagctccacgctcggttcctcgttcggcaccacgctcagcacctcggtcggcaggtcgctcagctccgcgttcgggtctgtcaccccggtctcgatcacgccgctcgtcgcgctagaattggggttaatcgccgcggttgcgaccaaagattggctgatacttacgaagtagtcgcgggaacgtccagtctcttggggatattagcagttataccagaagttaatgtaaggatacttacctctggatgagtaggtgtcaccgttcatgttgaggttggttgaggaaataaatgaacctgtcgccagtgaaggggaaaactcatgacccagagctgcaggcggtgatggcctcaccgcccgtgtgtcgattcggattccggcagaaaatacaaacatggagacagcgactccgccgtctcgaatcagtaatttggatttcaaacatgtctctaggtgttttgtcagaatggcagaagctgcctttgagcttgagtgagctttgcatcaatactacgctcagatgcggccagtcttttaggtttgtcagccaagtttccgggtccggggattgtagatcaagcgactgaccctttttagatggcggaactttccagagagtcaggaatggcgatgcgttctctatggccatcttctgtcgctgaagcaagactcaaacttcttgtactatagatctgtgcaacctccttcccatgcattcaccgacaatgatcatctcatccgcattatcaaacattacttcaacctaacgccaaatttgactgaactctactctcaatggtcatcacaagaccccaatttcaagaagaaggctgcgcaattcaccgggatcaggatccttcgacaagatgcatgggaagcattggtatcatttatctgcagcagcaacaataatattgcacggatctcacaaatggtggagaagttatgcatacattatggaaagcccgtggccacaattgaagggcgtgcatatcatgattttcctcccccaggcgcattgactggcaaggatgtggaaagcaatctgcgcaatttaggatttggataccgggctaaatacatataccaaactgcggttatggtatccaaccgagagcagggctggctagatagcttgagcaaccccgagtgtccagcatttggcgtggatcctaaaccaagcggcgaaatgaaaccagaagggcgagagggatatcgtgaagctcatgaaaagcttcttgagctacagggagttgggccaaaagtgtcagactgtgtcagtttgatgggattaggctggggagagtccgtgccggttgatactcatggtgagttcttttgataatgtttctgatttatctctaatcctttacgatagtgtggcaaatcgcacagcgagattaccgttttggaaaaagctccaataagaacttgaacaagacgacttatgatgctgttgccaatcatttccgcaagctttggggtaaggaagctggatgggcccatagtgtgcttttcactgcggacctgcggacctttgcagacaaacttgctgcaactaagaaagttgaggtgaaggtgaaagacgaagagtctgatgtcaaggttgagacaaaagtgacaactgctctctctttgaaggtttctaaggaggaaaacgtcgatgtgaaagtcaaggtcgaagacatagatgatgccaagaagcccagggacaagaagagaaaggagactgagaacattattcctgttgttcaaacaacagagacacggagaatgtccaagagactaaagcgttgaagccactaaagacaagcaaaggactattcttgactactacttttaccgcagaaaatatctatacatcttaataatgaatatgccagacgcaaaaatgtacgacgagacacgagtctagtgcaattaacatgggtatttgtattcaataatcttagctatatcaatgatcaatgcctacaaccgtagttagtataacggtcgaacaactcttaacacaagtcttgaagttggaagaggtagatcagaagtccaggtagatcatcgagctagcatccgaaaacactagctctgacataagaggtaccagaaaataaagtataacaaatgcgttgtatcatcatgtgggaatattggagattgagcaagaagaggttgaactgacctgatataagagtggcgagaggcgtgtcgagtgtatatcgtacagctcgcactcaagttgaaccagaaaccattaattccagtcgactcaagtgcagaactgggtttgtcggttgttggtgttcgaacaaaatcggaagagaaatgaagtgaggttttgtcgaagaaaagaaataagcgaagtctatcacgtgaccccacacaggccccatctttcccgcccactctcactctcacacttctcgattttcgatctttcatccacgccgacaaccgaccagatttcctccgccggacacatcaccaatccaaaatgggtcgtcttcacagcaagggcaagggcattgcctcctccgccatcccctactcccgcacccccccggcgtggctcaagaccacccccgaccaggttgtcgaccacatctgcaagctggctaagaagggtgccaccccttcccagatcggtgttgtcctccgtgactcccacggcattgcccaggtcaagattgttactggtatgaaaactcagaaaaacgcgactctaggaattggaggattgaagatttctaacattttcgcgcaggtaacaagatcctccgtatcttgaagtccagcggtacgactccctccgcccgcatatttacatctgtcgggtgaagagagcgaacaatttgtgtggataaactttctggttcggtgaaagaacccgttggttttgaagcgcaaaatgctcgtctctctccccgagactggtcgcagaaatgcaccagcaattaagcctctgcttggtcaagaacatctagactgacagagagattttggaatacaggcctcgctcccgaactccccgaggacctttacttcctgatcaagaaggtaaaaagaattactccttccccccccccccccccccccctctnnnnnnnnnnnnnnnnnnnnnnnnnnnnnnnnnnnnnnnnnnnnnnnnnnnnnnnnnnnnnnnnnnnnnnnnnnnnnnnnnnnnnnnnnnnnnnnnnnnnnnnnnnnnnnnnnnnnnnnnnnnnnnnnnnnnnnnnnnnnnnnnnnnnnnnnnnnnnnnnnnnnnnnnnnnnnnnnnnnnnnnnnnnnnnnnnnnnnnnnnnnnnnnnnnnnnnnnnnnnnnnnnnnnnnnnnnnnnnnnnnnnnnnnnnnnnnnnnnnnnnnnnnnnnnnnnnnnnnnnnnnnnnnnnnnnnnnnnnnnnnnnnnnnnnnnnnnnnnnnnnnnnnnnnnnnnnnnnnnnnnnnnnnnnnnnnnnnnnnnaaaaaggaaaaaaaaatactccccccccccccccccccctccttttatccatgtagattatgctaaccttgattatctaggccgtcgctgtccgcaagcaccttgaccgtaaccgcaaggacaaggactccaagttccgcctgattttgatcgagtcccgcatccaccgtctgtctcgttactacaagaccgtcggtgtcctgccccccacctggcgctacgagagcgccactgcctccacccttgtcgcataagcgcattttgggaggatgagtggttgacggaggaaacccatcggatcgtcgtgatagtcatatctggagggtctatcttctgctaggtacaacaaaaaagattacgattatttgataccctgttcatgaatgctctagactcctttgataattgtaggttcggctagtaggttagatctaggtaattttgttgcataagtgatcactcgtccgccaacacaaggtagttcagtataacatactagtatctactatttgacccatgtggttatacacattgtatgactctaagtagacacatatccaagtgtatatataggtgttctcacaactcacactcagcagctctaacctccctcgctacagcattgcaaagctcaactttaacaccagctcctaacaagatatggatccaaaggcgctgagtatcactcagccgatcattctccgacttaacctcagcgaacatcaccgtcctcgtctcatgattccagaggaacaagtccgggattcccccaccgcgctgctggtactcctgcgccataaccttgcagatagtagcaagtgcctctccccggaaacattgcacgatctcaactaagtcatctagatcaaaagaccagtcaagcccaacagcgcagggctgcgcctccgcctcacgagcatagacctcacggacgatccgctccgcatccccattcgtgatctcgacaagtcggtgattgatctccgatgcacgagacgggtagaagacatcagtgtggagatcgagcggacacgtctggaacgcagtttggaaaacattgggcacgtatgtaaacaggatatcgtaaaagagatagccgaactgtgatcaagatcagattaaaagctcaatcttccggatattccagactcaccagcgttcgcacaatccccccttcggagtgataccccttccatccatgatcgcggtaccaactcagacacatattctccaccctgcactcgccgccctccctctcatcaatccaaacagttgctttcccctttcgcggagcatcacccgtatcaatacggataccctcaatcgtgcgctcagccggcttgcctagcatgacatgtccgaaatcatgctgctcgcgctttaccacccgtagcgccttttccagcttcgtgatccgcttctgtaggtcgtaatgaaatatcagatggcacagcgggtcttctagtccggcctcgcacgtccgcagcgcaagtctcttccaatgcttgcgctggagttcttcgctgcgcccatctgcaggcgcaagcgcccacatgtagtgttcttccagcagtgccttgcgctggtaccaagcgccgcgccgcgccgcgtggaagagacgttgggcgagaagttcctctagcaactcgtgctcgcgtctatgctccttgaaccgcccgagcgcgtggagactcttgtggatgattcttgtgagcacccatgctggcgagaaccggcgtagataagcgccctcgccgctttcgtacatgttgtcttctttcttttgttcttgctcgacgagctctttccatcggggataggactggtaagcaaggtcgattatttgttggagtgaggcggtcgtgactgggccgttgaattcgaggatgttgtcgatggcgaattgggtttgtatcgctgattcgaattccaatagcgtttctctggacgagaagatggagtttgagcggcagacaatatattcggggaaatttcttttgctcattttggctaggataattgttgtgagggacttttcggtccattcggtggaacgatagaatactaggtgcactcgctcgaagagagtgcgaggcactggcgagatcctgatacatccacccgtgtagtccaatatcttttgggtgaaatggctgtttctgttatttgcgtcttgaagtcctttttgcgtctggctcgtttcgcagagagccgccagcagctctttcttgctcttgccctgaaccttggcctcctttgcaaaggccttgagttcttgcagcaatagaagtgatgaagcctcttccagcgttgtgatcgcttctatgccttctgcaaatctgaacgtatctccgagttctgaaccaggcaggctgcgatcccgctgtaggtcctcagcaacagggagcaagtccgagatatcggagcagtagttcaaccggttgatacggtgccatgcagacgtcttgcggaggaacagtcgaacatacctagtaaagcattaatctcaactataggttatcacattctacaggaaaacatacagatactgggattcgtaggacagcccccgccactgcgcaaagatttccatttcggcctcgtcaaaaagatgcgattcctcatccagcacagtttccagtgcaaggttgaaggcatccacatagatggagcttttgcccttctgccagacgccatctcgtagcctcacatgtaatcccgtcttggtgtcgttctgtagggcctcgtactcctcgattgcgtccttgtcggtcttgatcgcaggaagggaagtttcgagttctgtttggctgctaggaacaatccctaaatcgtccgctgcgggggtctcccccgccgtggccgaaggactcggactcggtggtttaatatctgcgtctgtactagaatactccgtttcaacagttcgccgacgtttcgcgggacgctgcgtctcccagaagttcagcaaggacataatatctcgtttccatggatgcaatcagtcccaatgactcgagtctccaagtataagcagacacgaacgacgtgtctcgcgagcaggtttcgaacacgtgatcacgtgatccatatagctccatcagattgtttgtcctgtttgcgtatgacatagacacaagaggcacagccaaaagcataagaaaggtaaccaaacaaagacgatctgaaacgagagaagaaaaaatgccctctgaaatcattcgaaaagtccccaagtgcaacctctagatataaaaatggccttaccagtaagcagctctccctcctacaacggatcgatacctccgagctccacagcttccgctccgcgaacactcgcattccacttcttcccaaaatatacacctcccaggtactcaattaacctgtgcagcctcccaccctcgcgatctcagatccaccggcttcctcggctcctacagtcaccacagctcaacccccatccacaatgggcgaaacaaacggcactggctccaacacgccgcttggcgatttgggctatgtctctgcgggtcagattcgccccggtggcgcgcctgctcgcgtctatctcaatgagaaggtcgtgccgtatctgcttgatgggatgaagtctgttgcacgcgaacagtgagtggagtattgtgcctggctagcttttttatacttgtctactagatggatttactgatctccttgtctttcgcttttctgcactaggcctgccaatcctctccgtgtgctcggcgagttcttgcttcagaagagcaatgaggtggagggggagactaagaaggagtcggagtagaggggagaggggttgggatttctttgggcgtttcatggtgcttgatcagctattctgatattgtttttatttggttttgaaagcttgtgagtggactttaatgtacactacgatgttcaccacttgataccccggtcgatgtctatatctgtcctgttagtaggaaggatcaatagcagaaaacaagatagagagaatgatatctcgaaaagcgaggtggtgattatctggtataatagattgaggatctacgtacctatgaaagtacggggtagagtattatcaaataggcattttgcaaaaatagagcgttttggcgcatgaattctacatcttgcagtcctttgatctaacgctaaggagggcgaagaacatctaaaaacatatctagaaggtattataatgtgataccatcccaagtaggtcagactactgactactcaacttctgcgtcgtcgaagacacagaccacatgattgtacttctaaacggatatatagacaccggggtacagcttatgggaccatcgaatcatgagagccaaaatatgtattcaagtttggaagcttcatagagattcctaaatggagtaagtacaaggttgttctatatcccgaccaaatattcggggaagaacaaaatattcgaaaatgaaagcttcgaataaagcctagataggtcagcttgcaaaacacatctcacctttaatggcattccaaatcgattaatgcctggagtttaaaggttgagactacaagcgcaaagtcgacggctttgaattgggcgaatggttgatcattcagttgtttagagaagtcgaatacaatcgggccgttactggagatggtgtataggtgaagttgtagctgtagctgtgtgacgaatttgctgaccctgagataaccgaattacagcgataattttctgtccctttgccgctagaagtttttttccccgaagttgcgtcgcaaacagacatgaaagagatacctcatcaagcgaccgaagtgtgcatcgatgaagttgccgagtcgtggcgctccgtggttttttcttttttaaatcgtcgagccgagaattgacaaacaaagacagcgacgccccgtggcccgtcgcccaaatccagcattaaaacaatcccataaacaaagaaaaggggggaggaagtgggcaagttggtgaaacatgggaaccaggaaccaggagacatcaaaggccagtctctgttctggttagaaaataaggggaggcactttacctgccagcgtaccggtcctcgccggcaccgccgccgctgccaccgccaccgccaggagcaccaccagtgctgctgcgtgcctgaccttcgtaggaacgtccaccaccaccagcgtaggggtcgcgagcctcacggggaggggcagcagcatcgaagctaggagggttggcgtcacgatcgtagtagccagcgccgccgccaccgctgccgcgagattcctcagcacctccgcgacgttcatcgcggctgtaacggtcatcacggccaccgccgtagcggtcaccgccaccacggtatgcgtagtcgtcgcgtgattcacggcgaccaccatactcacggccaccaccaccgccaccaccagcgtagtcacggcggccatagtcacgtccgtagtcacggccatagtcacggcgatcattgtaagagtcgtagcgaccgtagcgggagtagtcatcatcgcgacgacgccagccgccaccggagggtccacggcgatcatcgtagcggtcacggcgaggaccacctccacggctaccaccaccaggaccacctgggggaccacctgggccatctaaagaggaaaaatgtaagtcgacgtaaggcgcaaggggacaggacgatgtgacttaccacgtttgggaggaccaaagtactttccaggggtaggggtacgagggcgtgcacgtcgagccttctcgatgctcagggtacgaccttcaataacttcgccctggagaccctccttggcggcatcagcctgctcggcggtgaccatgttcacgaaaccgaatccacgcgactccttggtgtggggatcaagcatgatagaacagttatcgacatcaccgtacttctcaaacagacgcgaaatatcagactcggtcagacgcgggtgaataccagtaacaaagaggttagagccagagttgatggcaccttcatcttcctcgacaggtttgcgggccagaggagctctggggtttattagcttctaattgatataccggactagacaaatacatacctgtcatcagaacggccattgggggagcggctgcgagcacggtcgcggtcggctcgaggctcatcgcgaggagaggcgctgcgctcgcgatcatatcggggctcgtctattgaaaaagggtaaatattttcaagcgcatggaaacaattctaaaagacatacccgcgtagcggctggaatcgttgtcgtagtccgccatgatgaaaggactgaaggtgtaggttgaaagaaggaaggaaaagaagttggaaagctgataagagcggacgctaagcaccggaaactacacacccgaggaatcaggcagcggtgcaaacttgcgtggatttcaagtgaattggatgaattggagggaattgggagaataaaactagaggtttctttttccttttcaaaatacgagtttatgcagggggttatcttgactatgacaaacagctattatgccaagaccgaacaaatcgccatattaaagcttgatagtacatactcatacaactaagactaactcctgagattcgacgctaaaatcaaattcgtgaaccctatacccatcatgtccagaagttaatcatcgtgagcctcgcaaacgtagagtccgacgggtattttgttgtgaagcagccggggtactgggggtctggcccttcaggtctccatcatcaaccaagtccttcaacccttcgagttcatcttcatccaattcactgagttcttcactcattccacgcatgacatcccgtccagtccaccgttcctcgtgaacagtcgtaccgacagggtcaaagggttgcatgtaccattgaatgccacccaaagccaaagggagctgctggtcttgctcggtcaaaacaggcgttggatgtcgatagtaggcgttgacactctttatggggtcttcagcaggaggtagctcttctgccccagatgcttcagggtgttgttcacctgcagtaggctgggcttctgatggagcctcggtcgtaggaagcgtttcctcaactccttccatagcatcagggtgaccagacagctcagtatcaccttccggctcaacagaatcaccactgcgtgacatcacactgtggtcaagaatcatatccagctccttcaattccttctcgaacggtttgcggttgagttcgctctctttcctgatcgcatcctccagggaaggctggatgactttgattatccgctttgccaatttcctcttctcgcgttgctccaggctgagctccggggcgcgaccactgatctgcgcttggagttccgcggtatcgccagcgggctccacgccgatttctgaggtgaatagactggccaagtcagaagagaaggcagcgacggacggatagaatcgttcgttgagcctttgtcggattgacatcaaccctggtgcaaacacaccctttccatcgagcctagaatgaagtcagtatgagcgttgacaaactaggacgagtatatctcacagttgagctttctccaatattggccacagcaatgggaatgtagggaagtagacaagatcgacgatgttacgaagcatctctgcatccttcaacttctccctctcccgtttcttcacttcgtcgcatagcattctcaatcgatcaagatccttgtaaagtcgctcaccaaactcaatgcgacgctctagacgtctgtgtccgggtacacccattgctacatagtctcttcgtgtcatttccatagatgagaaggtctccagctgcaactggagtcgcttgagcaatgctgctccacgcctcgcctctcgtttcaatgtccaatacttggatgcatcttcagcatattgcttcctttggcggactgtaaatcgcccgagagaagcaatcactgagtttaacacaacctgggggataactggcgcaccggaaggcagcttccagattgttctgggaacacgtttccgtttatttccaccgactgttaacgtaaggcgaggagtgagggtgcgatcttcttctgctccatcattggggtgcgcagggcccatcgagagagctgcagcttggctgtctccccagcgtctaccttgcatagtattgcgatagtattcgatagcatcggcagttgcagcatcagtaccatgctccaatcgccagtcagaaggaacgtgcttgtcgcagaaagccttgagaaggtgcgagtccataagaccatggccaatcttcatctttagataaagttgagctctgcgtgcacatgagacatggaaagcaacaaagcagtttttgttgctgcactgaatggatgcacccatccgctgtttgcagatgtagcaattcaacttccagcggctgcgtggaaccttttcgacatcggtcaccggctccataagagatggattaccaatagaaacttcaggaatccagaaagagcagagtaaatgagcccatttagaggaggttgtttgtttgaatgcgccctcagtgtttgggcagaagatacaattggtggatcctcttcccagcaactggcacttgcggcagagccactgaccttctggaatgaaaggaacaccataacactcttgatgcactgcaaggtcgcagccatcgcagaaaacaattgcattcgagttttcacaatcgccatcatcacagatagcacacttgctgtcttgttcttcgcccggtcccgctgtttcgccattgactgcagctgccgagctagagcgaagacgtccggtctgcgggggtttgggattcggcttggggatgcgcttctcaagggcatgccattccctctcaattttggtcatggtaatctcaaacacagcgggcttgatgggctcgagctgatcttcacggcgcttggcattgtattcctccaaccatttttcatcctgttcatccatgtcatattccacacgtccaatggtagtgttaacgtctccatctgtcatggcaggttgaatcacatcaaggtcatcttcttgggtgccttcggtcatccgaataaatcgccggtcatggcgcagaaagagatcactctcctggtatcccacgtttgccatggtccgatcgacatagttttgatgaccgacgcccttcttctcatagaatgtgaaagggtcacgcagtctgaacgacggtttggggagtgtgagtttctcccgggggtttgggcccggaggcggtatgattttttgtccttgctgggcaagaagggcattaaggatagcctcggggcgacgaggtggacggccaggcctgcgtttgattgggattggagaggccatttcgcctgatatgatgactggtgatcctgaaaggtccgagattgtcgcaccagccagtgactccaggcttaagataggacctgaggtatctggagcatcaacctcttcagacgtgaagacagcaattttgccatcaatgtccaagtcgggatgaaactcttcccacccgcgttcttcgcgtggcttgtacccatcgccttgttggagagcaagagcggcggccgttgaagaggtgaaccgaccacgggcttggttcttgtcgcgccttggacgcgacatagagggcggtgttgttggtatgatgggaggtggcggtggaggggctagaaatggttgctccatctcatgtggtggacggcttcgagcacttgcggagtggcggcggggagtagttctcttagaagtttctggggcagtggcggcgacgactgctgcttcagcgtcgaaatcgatgaatcttcctcctcctccagggccacctggaacgtactttcgcttctttgaaggagggccgtcaggggaatcgacggagcggctgttggatgatttgagggaagacctaggtttactgcgtgatgatcgacctgagattgaatgtctggccgtcggtgccataattcaagaacaagctttcgggtgtgtatgtgctcgttggggatgaggattgttaatcggacggcgtcaggtcgcgttcagggcctgactcaggcagggcctcgggaaatatcaaagtcgcaagtatcaagtcatgcgacaggaaactagaaaaagaactagacacaatggacgtaaaggacgccagagcccgtggaacctgcaaggcgcgatgaggtgtttggttatctagtcaaggcggagacgcctgagctgtctgggccttttggcctgaggcgccaatctggacttgaagcacctccgcaggttgacatgggacatgacatccacagctatcctttgcgacctatctgcgattttactcattcgatcgagccttgattttttttttctttcacatagatttacaacatgagcggttctagcgacaccaggtacgcgttatctacctcaaaacaccgcgcagttcagcttcgctaactgttattgccctcctcagatggcggggcggacccagtcgccagggatcgcagcgcaactcgaacaaccgtgataaaacaggaggacagggaagcgcacgggataacaatgctacctggggcgcatccaaccctccgcaggaacagcatgttcctgtacggggcttcaacaccgcagaggtcaagaacgtcctgaagggtatgtatatgcatctaatctccaagtacaagggctaaccaagctttcgcgatatagcaggacctcatggtacgccttatcgctgcctccatatatactcaagcctaacctatgcgccatcgatacagaaaccaagtcggcggtgccctacaaatctcattctaaagacggccctacccaacgatctactgcctggggtgccaagggtacagtctctctttgatcgcagcatacccttgagcgaagaataaccatatctacagcacaaaacatggcgaacggcagagacttcttcctggagcttcggaaacagattacttcgctgcagcgaagcggtccccctgtcggcggctgatcacgacgtttacgacttcattatctcaaagtacttgcattgcacagtcggtcggtcgcgagtttggttcgttttcatgggttgctacggcgcatcttcgataccctactgtggaggatgcatgggtgatgagtggactcggaagttacatggcatcggcgtctccgatggttctgggtcttacatgtccataatgcactatgactcctgtttttcaaatttattcattacaattcatgcgctgcatcgaagtttatggcgatgcattattttacacacgctattatacagagagggcatgtcactaatatacaagcaggtagccattcagctacaattttcacaatttgatccacccccctgggccaaggatacctccatcatcagcctgcgagtcgagggtccatgtccgcagaggacgacagctgaggtcggatcggaagccagcttcgaacatctcaatgcccgcccacccaatcatggccgcattgtcggtacacaaatatggaggcggagcaacaatcttgatatggccaaaaccgcgcacttccaaaaatgaagtaagcactttcatgaggaactggttagcggcaacaccaccactgacaacgagggtgttgatgtcattcttgccattattgtgcggccgcagagtctccagagcgatgacagtgcgcgaggcaaggtgctcgaaacagacgcgcatggtttcccggcctagatcgacacgctctgcattcgatatcttaatattcgtaccgttactttgaatgatcctgccgaccgtgctcgaaatcgaagcaaagctgaactgcatatgccgcgtattcgcaaatggagtcgtaagataccagccccaatcgcttatgcgcttggctatttcttcaccccgagtctctggcggcgagtaatccgcaaaatcggccttgccgttagggaagacgaattgctctagattcttgccgtacatggtacttttagcttcttgaagcaaagaatcaggtagaatatctcgtgcagatttatccagtgcctctccaatagcgatatcgtcgctgttagcgagaatcctatgttctgtgaggccttccgaatgaaccagagtcgtatggccgccagaggcgagaatagacaagaaagggaattcgggcggtgtggatgggtcggccttgagttcatttcccaggcatgaaacgagtcggggtgtcaaaagatgtgcctgcatgtggtgcactccgaccatggggatctgccatgcaaccgacagcgcttttccagtgtcgaggccaacggacaggttagaccgcattccggggcctcttgtagcggatatgaaatcggggaggcggcgacaagtcccatctgccaatttaagtccatcgccagtttttgaccccggtaggtaattaagggctttctgtagaagctttgcgaggttggcttggtgggattcgagagcgatgatagggtgaattccgcgatgcgcgcgtgtgtcggccattacattttcgaggaaatgaattttggccgtgctcccggagtctttctttgttttctcaacgatagctactgatgtatcgtcactgttgttggcaaccaataattagttgagtgaccttctttttcgggtgttcatctccgcttaccatgacgtttcaattgccaacgtgagcaagccacggcgggaggctaaacatctccctgcatttagcgccgacctgcgaaaactcgcagcagggctcactgagaataacattggtaaaatgcttgacgtacgatcggtggcaggggcgaaaaagatcggaggcgcacgggccggagaagcccttgaatggagccctaaacaggtaccaaaatagccatctatagtgatcgagctacggagtacgtcccaaagaatcctacatacaacaacccaacagggattggttgggcggaagctaaggccggtatcttgctattggaatcgcgcatatatggctgaggatagttactattgtatttgcactaacgaacgactaggttaaacatttatactcaaaaatcaaaatcatcaatccagatcccatcataacgtcataaatatattgtttctccaaggcactgatacatcgagttcccttcagaatgtgcggcgcgcaccaaaccccagtcagcccagatgaatgatactgacgagttctgggccagcaaaaagcgcgaggcggcatagtcatccacagaaccatcttgcgaaggctggacggatacgttaatgcgcccttctgtcgtttcaattcgcagtttgaggacgtcgattgtcaggagcgctaggtgctccgtaaattgatccaacaaaagaaccggggtgtagggcgtagcatcattgcaagatgtagaccccgaatcattcagaagcacctggtcgctcccattactccagccgtgaaaggtcattaatgataaaaatctcgaacatgatctcactgccggaccgtccatcgccgctcttctcgtgacatcttcatgtgcttgccgtaatactcgtctggattctcaataggcgttacgcagtgaacagtcggtgtccctttgaattgtatacgcttgtcaacagtgccagcgcgagaggacgactgcttcttgaggatgctctttgatgaacaagagtttgtgtatgcataattcggaacctgcagtgaggaaaacctcttgctcgtcgggctcgccgcggagattggcgagacaggcgtgcgagggagagcacttggtgacttgagtgatagcgatggccgaggaacattctgcgcagcagagatgctcaaggatagctttggcttgacgacacgggcagtgtacattgtgacggatgaagaagtttagtacaacagtgcagttgatgttattgcgacttggttttcacggggaaactttgctcaacaaagatatccgagtaggcaaggagaggaacaaattattgacgtagatgtataaggagctgaagaacttgggccagccaaggcgaagagacaaaaatagaaaaataagaaaataagaaaataagaaaatctcaaacgatacggagtatgcaaaacagtctcctgggggggaaagagggcggctatatacacttgagggggagaggggaaccaaggaggactgccaaccaccttcttctgcctaagcgcctactctatgcacgacggtgcatatatcacaatcactatcactatcacgcccgagtttctaaacttagacaagccttcattccatgcagccaattaaattccccacggggtgcaactcccgtctaatgtgatgtgatggacgggctgtccaacatgccctgcagccaactgcacatggtcttccaccctggtcttcttccctggtcgtcctgtccatttgattcgaaactctcgaccgatgatcactcaataggtgagggatatcgcacttacataaagtggattcctgcattattcggtgatatccccgcattatcacagtggctggcagtcagcagcgaaatatgattggtttgaatcttggcaggattgttgtgacctactataattagatatcacatgggtttgatgccgctatcaactatttttactcgagattgagcgatgaatgatgtccatcaatccttcgatatagtagacgcagttgtaacatattggtcacatttcgtcttttggggagccaattgacctctagtcctgacaagataatgctcatctatgttacatttctcttgcgtgatcgtcctagtgactcgatttccttattttcaaatatagcacgtatctgtacggagtacgatgcaatgattgaatatgttttattaatagtgcatctacaaccaacgaagagtggttgacatgtatacatatggagtacgtactatacttactcggaaaacaccaggggaggaagagattggttatgacatgagcgactagctatccaaagtgggcgtatgacttgacctgataccaggtggttagaatgcaggacaagcacatgggacaaacatatatagaaaacacgtaaagcttggaataaatcactcactcgagctcctataagtttaggaaatagcatcctacggggggctcagtgttcggacatagcttgttatgaggatgaagctcttgtttgttcagatcagttaggatattgagctgtgatgggttgggataaatgcatcttgggaggagatgggcttgtagagatattgtagatcactatttgagttcatggttactatgaataactaaactcgaacaaaaattgacaatgtctttgttttccaaggtgtactccgtagaagtcttataaagaactcggagaagaagtggagcgtatgagcgacgacaatgctactgtatatgtactagatacggagcatgatttacaggggtatcttattgatccacctttgataaacaaaagagtccgccatttctcgaagatgttaacctcgggacatccataaaatgagtttaatatggccagctgggacttggaggttctatattataacagcctcggtagcactgccagatgtaagggcactcgctaggataacttgtattcctcgctatcttagatatagtaacccgctttcgaattgattgtttgtctcctctataccgcggatctgcaatcttgtatggagacatcgtctagaatccctccgggactgccggcaaacctttagctgtcaatcgtttctggagctccaaaggcttaagctcaagaaaaggaccctcaagaccgggagtcgcgggtgttatagctacaccgctacaccccactactgcaatgtatgtgctgatgatcctgatttataaatagaataaccgctgtcagtgagtccaacccttgcaattgagtttggtgaaagccggagatgtttagcatgaactatagcaatagctagaaagcatgccagaaagcatgcattatctgatcgattgcggagaaacaggggataacggtagtcacatcaacacccggactcggctcaactccggcaggcttgggaggagaggggaaaagacgagatgagccaatccaagtggaattctccaaattccttccccaccgcactccgcaccgaactcggagactttccttttcgtcttttcgtctttttgtcttttcgccttttcgtccacagactcaccggttccgaatgggccatgtgacaggatccggtttcttcctcatctgatccttctctttgaaagtcggctgcacgtctcgggtagtgtggtctagatcccgtgtatataccgtggctcatggcgagaaaccaaagggttcgcgaaccagaagtactagttgaggctaattcagggacacatttctatacataacatatactatgtagatatcgagatatccataatgtggagatcggtccaaggcgagactctccgatccgggtaaataacacgccataatgagaaaccccaagggatcgaaaaaaatcaaaaaaaaaaaaaaaaaatcaacgtggccacgacaacgaaaaggtattgttattagagaattaaaatatcaaatctatctagattacgaatagtcactcaaatattataagaaacaataaggaaactttgcagagtgggctccttatattaaagtatcataactttttctattgactcagtcctccctcttctccacatccctcgctcccttccttcccccagtttttctctttgtgcggccgattttttttttgtttagaactcaaaatcaacttggatatacacaatggccagcgtaacagaagctgtgaaggaatcgttcctgggccacaccgaggggcctcatctgtccttccaggcgcgctcaaacttcctccgccatgcgcaaaaggacgagaatggtgacctcttcatggatgaggagaacttcatcgatgccgtggcaccgaagcaggaagactatgtaagtatcaccacggactgcagaggtaccaaaatcttcgcaattgctcatctggtttcctaccgcggcagcacaagattaagcgcgaacaatatggcatccttttcagcgtcgcagaccgacggagagccggcaggctgaacattaccgactgggcctccttcgaaaacctcctcgcgaagcccgacgccgagtacgagatcgcctttcgtctcttcgacttcgatggatccggcactgtcaacttcgacacggtgcagggactgtacaacctgaacaagagtccggacagcattcccttcaactggagctcggagtgggcatcgctgtacggaggccgctcaaagtctcgccatgacatgacctacccccaattcgcccagatgctgcgcggtctgcagggtgagcgcatccgccaagctttccacatcttcgacaaggatggggatggctttatccagcccgaggaattccagcgtatcatcctcgagacctcaaaacacaaactctccgactacgtcctggagaacctccccaccctgtgcaatatctcgacgagcaaccgcatctcttacgccaatgtccgtgctttccagaatgtcatgcgcgagatggatatcattgatttggttgtccgcgaagcaatagagaagagctccgatggcaagatcacccgtaccgacttcctggacgaggccgctcgcgtgacccgtttctcgcagttcacacccatggaggccgatattctgttccacttcgctggcctggatgcgccttcgggacgtctctcgcagcgagactttgccaaggtcatcgatgcttcatggcgtatccccgtgatcgctgtaagccatgccatgactaccggagaggaagttgtcgagaagaccaagagtctgctgcacaacgttcttgagtcggctcaccactttgctttgggcagtatcgctggtgcttttggtgctttcatggtctaccccattgatttggtcaagacccgcctgcagaaccagcgttcgtctcgccccggcgagagactgtacaacaactccatcgattgcgctaggaaggttatccgcaacgagggtttcactggcttgtactccggtgtcattcctcagttgatcggtgtggcgcctgaaaaggctatcaagctgaccgtgaacgatctcgttcgtggccacttcacagacaaggaaaccaaccggatcaagtaccctcacgagcttctggctggtggaactgcgggtgcttgtcaagtcgtcttcacaaacccccttgagattgtgaagatccgtctgcaggtccagggtgaaatcgcaaagaacgtcgagggtacccctcgccgctcggctctctggattgtcaagaacctcggtttggtaggcctgtacaagggagctaccgcctgtcttctccgcgatgtgcccttctcggccatctacttccccacatacgcacacttgaagtccgacttcttcggcgaaaccgctacaaagaagctgggcgttgtccagctcctcaccgctggtgccatcgccggtatgcccgccgcctacctcaccaccccatgcgacgtcatcaagacccgtctgcaggtcgaagcccgtaagggtgaaaccaagtaccacggtctgcgccactgcgctgctaccgtctggaaagaagagggtctggctgccttcttcaagggtggacccgcccgtatcatgcgttcttcgccccagttcggtttcaccctcgccgcttacgaggtcctgcagaaaaccttccccatgcccggtgagggcgaagccattaccccgactggcttcgtcgagcctagtgtcggtgggcagggtgctaccgcgcccctgccttacctccgatcaaggaacgcgctcaagatcatccttgacctggatgagaactttggccgtgtgaagatcccacggcctgagaactggcccaacttcatgcggagctcgaagtagacaggcttgctgtatctagtgaacctgcgatttctagtctttgtttcttcatttttgttactagcgatatgtttcccatttctcatttggtcaaggcctacctttccctcgatttagcatgagatctttctcacatttcttttggattattttcctctccgccctcttcatggttcaattgggcttgatttgggacgtgcatccacgcccccctttgcatcatattgtcttctctttcttgtcggagaacacctgtgtttgcattgtaccaatagtagatagatttggaaagaaggtgtgtgggttgtattagaggccctggttgtggtggttctatcaatctagatctggtccgagttgttattctccggtttgtgtggatggaagcgtagatatatatatggccggatgtggttcgtggttgatataagttatgcctagagagcagatagatcctgtctagagcaacggaatatttggctgcatttgtattgcagtatttaaattttattgatttggagttatctatctggaaaatatgtacatgaagcatgatttgcaagttcgcaaacgggtatcggaatctactctcaaggaaagattccctgtacagatgatgttacatttatatcctcgaggatatatcggtcatggactggggccatgtgtgggaaatgccaaacccaattgtcgtggatagaggggaatcctatcgtgatctagaagatcaattcgacatcttaagccggcagcggcctaatggggtagtgtataccccgagttcacaaggccgatgctcaagaccagaggcacattctcgatgaagaccaaagtagtccccattcaatagaatctaagctttcgtgtcggctctgtcttaggaacctcatcggtgcctttgccttccgaagactgtgcgggctgcttttgttctttctcgggctcctggcgcttctctgcttgtgtctgggcggtcttcttctcatgccatagggaatcttcggcttcaatctcgcgcagcactagatagaaatagtcagacaccagccctcaaaatatagttggatattggctaacacaccctcatcccactctcgttcctttgcctcatcgcccgttcccagtaacttctcaacatcgaccttctctccattcttgactcgtgcaataatctccgctagaagttcgatcttcgcatccgtcgtccgagtatacgccgcatagccgttcttcaaggtgagcatgcgaatggcttgcgacccgatcagggtaaacatgatgatgtagaacgtcgccgggttccattccttggatttctctttcgcaggatccttgcgcgccctgccaccccgaagaaatcggggaatcattgccgtccatactgacgtgtctgcgatcttcggaaggcgatcggaggtcgaatatgagcgccgagtcggggcgcggcattgtctggtagcatttgacgtagaaggagcagaaaatatctgtctgctgagcccaaagggcttgaatctgaaagccataacctgttcgcgtctagcagcaactgtcggttctcagaagcgggaaaagttgaggtcgtggttgcctgaggcgataaggctatcaacgccaaatacggtatagcgcagttgttgctgcgacaaccccccgtttacagtccggccgatagcgattgcacatcaaaggcttgacgcgagcgatgacctcagtcctgcagcttcaatagaacgaccgaaaaaatggcggtcaccgtcttaccgtcaagctctctaacagagtccgtgaaacaggccctccgctcaacgacaacatgctcggacgctaccgtgttgtccctccaaacactcctccgcgggtcgccaaagatgcccgagaaacccacgaaacgcacaaaatccacaagagatccagtcgcggcgccgagccgaacgagaaattcccgcgcgacaaagacgaaacctgcaaatgatgctacgctccaatcattcgccgatcacgatgcggcggcgttgtcgtgtcaggagaaactggtctttgctacagaggtattcaacgccacgttaaagaccctcacggacgccgcgaaactatctacagccaagcgccagaataatacatccgacattgccaatgggcccgacgcaggaatcgtctcggctgcggagtgtgcgagactttctttgtccacactgcgcactctcaagaatgatgctgggaatgacctgttcccgaacatgcagctcgaacaggggctgtgtgttcttgcgggaaagcttatttcgctgggactgaacgacatggcatataaagagcttcgacttttgaagcggagaatccaacaacatttggatcgcggaaaggccgggaagaagaccacagaagcaaaggatgtggtggaagaagaatcttcgaaggaaagaatgtcggatctcttgacgtttgctcacatctcgaacgcaaagtcgctatacgccttgcttgttccctttcactcgaatgtgatgcgcctatttgctgcggataaaagagcctccacgatccaaaaggcttgctcttcattgcaactttctgatgcgagtagtcctgctcaagttattttggctgccttgaaatcaggccaactatcaaatgacaaagctgctctccaactccagctattatcgaataccgttctatcgctttgctcggggacatttttctcgaaggatgaggcctcgaatggcttgaagccaatgacctcattggcccttcaattactttccctcgaggttcgatgtttgggctggaagttgtccggtcatgtctatgatgagagcaaagaagtatttgatcctttgcttcgctattttggtagcttttctcaccggagcaagggtattgacaaagctgagtttgcttcaatttacaaaaccgttacccggttgcaaacatccattgcagaggtcaagaagaagtattcagaaacacaaaacgccaaccaggctgccaagctcatgactattctcgggcagcttgctttcgacgcgggttgttttgatgagtctatgaagctgttcacggaagccatcaatccgctttcaaaaacccagtctctttcgctcgcaacagttcggtgtaaaattgcatctgttcattttcaggcttcgaatacatcaaaaaagttcctgaacggagctttggattctgtgtcagaggcgactcaatccctaggattgcaattaagaggcagcgcaaacgatctagatgaactgctggtggaagctgcaagactgaagaagctggctcttgcgtggttcggagaggctattacaaaaggttctgagagcgaaagcgcgaaaaacgaagttgctagtcaaatcagggaatatctgcaagcgtttatcaggtttctcagacgctttgttggacgccaaccaacagaagacagcgacgaaaatgagatcgagatgttcaacaaacgcatttcaatttctagaagcatcattctaactgccattgactctactgtcgcaatcgggaaactttctatcatgtctcagaggccaccttgggaagacatgcttccaattctggctgatagccatcgcctgctctcgaccatcgaaaccaccgatgaaaataatacagagatatcagaaggcctagggatggcacttgtgaagctttcaaacttgttctggtctcgatacatcaaggaaaaagaggccggacagggttatcgagacctcataccccttctcaaacaatctgtccagctactttcaagttgttcgcctcctcaacgcaacacggcatttgcagctctcaagttcgagagactggctcatctttacatcgagggcaacatgtacattgaatcagagcaaatgttccgaaaatcgattgaagaatacatactctctggcaccctagaccagattgctaagagcagcggaggacagaatccaagttcgctcaatctggatcctaagagccctggtttcatgcttggccgtgtattttctgcccttctgaagatgaagctgcgcaggaagggatcccacccgtccgttgtctatgatgatgttgaactagaattcgaacagagatgtcttcttattgaatggcagatgagtttgcttgttgaaatgcctggttattcttcaaatgaagaagagtttcgcttgattctcggctcagctgtttcttcactcctcgatctctacccctttgacgtctatcctattcgccgttctcgtgtgattctctctgccttgcggcttctattggagcagcccactgccttggattcgtctttgattcaatccctgctggatgcaggagcagaggctttggataccggcttacaggtccgagaagatgtcgatcttgcttcatttgcaatccacattaacaactcattgcgcgttatcattggcttccaccgtggcaagatcgatgcaagcgaattagacgacacgcttgcgtcgtggaactcgttggcgtcccagtcccatgactggaaaacattgctgctctgcatcaatgacacggactactgggtcctgcagctgaaggccctagttgattataccgaaatccacgggctttggaaggctcagctatgcaccctggaacttatattgcgtgccgcggagctccagcaatcaggggatctgtcagacgctatcataattctgtcgcgcttggtactgcagaattgccgtctgggctactgccagaaggcaggtgaactgctatcgcgtggtgagcagtatcttgcgcaaaccaaggtttcttctcttgctaccatttcctataaagtcgcacgggtggaatatcttctagagaccggagagatcgagaaagccgccgccgttctttcagcagcccgctcactgtacgaaaaatgccaaaggtcagaactaagcagcttgactgtcctgtcgaagatctcatgggaaagactggtagcagatgctgcctttgttcagtccaggttgttctccgtacagggctcagcgacccaagctctgtacttcgcaaagttgtctgtaaggctcaactgccgcatatgggccaaggttgagagactcgcccaaagaaagcaagacaagctcttgcctgcttcagggaattctgatgttgaggctgttgctgatggtatagcaaagcttgatttgtctcagaatgggtgttccccggatgtgtctgccagctacatccaaggtgcgcctttctggcctcacctaggttctcaccatacctgcttgttgaacctcgccactttatctgcccaccatggcttgttccaggatgctatctattacggcgaacaagcgctgaagattgacaagacccttgatgccaatgtacggctactggcggcgcagacccagctcggttgccattggattcttagtggccacatgaacgagggtcaggatcatctctctgcagcggccgaatcttctaaacaatcccagaacagtattgaaacggtgtcttttcaaatggcccttgcgtctctgtacaaggcgcaaggtgcacatgacaaggcattgcgcgttctccttgaagcagataaaatcatcacagcggtcacctgtgccgatatgactgctaatctggagatgtcaggcatggcagaaatcgaagaaaagatggacaagttacgggttagagcaaccagccggcgaactccaacacctcgaaccccgacacctacggctagtactactcggcggacacgtgcaaccagttccgctgctcccaaaaccccaaagaaagctccagctccaaaatcaattctcccggacgttcaatctcaatccctattacaacttaaaggcaacatccttcgacagcaagctgattgcctgcggaagttgcgtgactttgagcgatctgcgcaaacacttgcagaggctagacaatttgccgtggcccgagaaagcaagatcactctggagatcggtgaaagcgagcacctgttggctgatgcaattcgccgctttgccagccatgctgtgtactgcgtcttacccgaatctacaatctcgctgccgtcactcaaaacaccaagcaagacggcagaggagcctaatttacccccggcaagaccgacaaggagaacgagagctcccgccaaaacaacgcgcactaaggctcaacgagccagtgatgacttttcggttatgctgtctaaggcgagcgattgtcttgccagtgttttctccgatgccacaattctaggctcgacgcttgacagccatgcggcatctcgcttgatgagtcggatctctatgctatcacatgcgacttcccctggaataccaacggctctggcccagtcgcccgcaaatatgaatggtaagttttgcgaggtcctttctggttgacggatatctgacttttcaattagagattggacgtgttggcgcatttgcccgggagcgcatggcgattgatatcgatcgacagttggccgattttgccgaccctcttctttggccaacctcgttcccttcagcggtcgagcttgacaatgatctttgctccaactttacacgagattatgtcgacattctgcccgagacttggaatgttctttctttgtcattgagtgcagaccataccgaatttgtggtttctcgactccaaaaagaccgctcgccattccttctgcgccttcccctccaccgaggaaattcagaagatgatgatgaagagcaatttacctttgaggacggaaaggaggaaatgcaagaactcattaagctcgccaacgaaagtgcacatgcagccaaggcccagacggacaagttgtcgaagaaggaatggtggaagacccgcgaagcgctcgatcgtcggatggaaaatgtacttcaaaatattgagaacatatggtttggagggttccgcggtgtgttttcgcctctgtcacgggatactaccgcgctggtccggttcgcaagcaccttccaaagcatccttgacaagcatcttccttctcggcaaaagggtggcaaggccgctggcccccgactcacactacatcagaatgtggtggacttgttcattgggcttcgcgatcttgaagaacaagaggagcccgaggacacgctgatggatcttctttactttgtcgttgatatcctacaattccagggcgagcgcaatgcctacgacgagattgacttcgatatgatggtcgtagataccctcgatgccttgcgagggtatcatgaagctgcgcgcgatgaacttgcagcacggccgccgagacatacaatcctcgtgctcgataaagctctccacctattcccatgggagtcacttccctgtctccaaggataccctgtttgtcgcgtcccatccctcgaatgcctcagggaccgagttcttcaattccgcgaggcatcctccggagccattgtggaccgcaactctggtggatttgtcctcaacccaacaggcgacctgcacacaacgcaaaaaacgtttgaacaagatctctcccggttcaaatcctggactgcaattgtgcagcgcgaaccaactgaagatgaattccgcgacgtactggaaaagaaaggcctattcctgtacttcggccacggcagcggcgcgcagtacatccgcggccgcacgatcaagcggctcacgcaatgtgctgttactttcctcatgggatgtagcagcggcactttgaccgaagccggcgagtatgagccctacgggacgccgatgaattatctccatgcaggcagccccgcgctcgtggctacgctgtgggatgtcacggatcgggacattgaccggtttaccacgactgcctttgacgcttggggtctggtcgaaaagaaggataaaaaggataagagccgaggggaggatgttgggcttgacacggcaattgcgcgctcgaggggtgcgtgtgtgttgaggtatctcaacggcgcagcgcctgtggtttatggagttccggtgtttttggagtgaattgagttcatgtttctctcttattttgtatatatacctggcgttttctccactgtgggcagcaatctgatttgactcttcatgctcgacctttcaatgggttattgttaatatatatgtccatctgttatggtatatcctatctaaggtgcagttaatagactagacaatgtccaatgcagtagctctaaaccctgacatcgaatatcatctagatacatagactatctatatactcctgtaaaatctataaaatccgaaataggaagaattatcctatcgaggtggacctcttttcccctcatgcgggacacattccccccaccttaaaacgtcaacgtctcccggctcgtagctttctgttctctttcttttctccttctaacattggaagatacatcaaaatgtccgtcaccacaaacgcaaccatcgcctccttcggtggcaagctcttaaagctaagccatgccgccacaaccacaaaatgcgagatgaaattcaacctcttcttgcccccgcaggcccagacacagaaagtccctgtactgatctacctctccggtctgacctgcaccgccgataactgctccgagaagggctttttccagcacagcgccagcaagaagggaattgctgtgctgtaccctgataccagcccacgtatgtgtcttctgttttatcgcgtgaattttccatatacctttctatcaattgaagtcatacggttgaaaagtaaagaattatataattaacatgctcatcttctaggcggcctcaacatccaaggcgaggacgatgcatacgacttcggctccggcgccggcttctacgtcgacgccaccaaagccccctacaacgccggctataacatgtatagctatgtcaccaatgaattgccacagaccgtctttgctgctttcccgcagttggatgccagccgtgttagtattactggccacagtatgggcggacacggtgctctcactttggtaagttatacactgcggcacaaaagctggaaagaatatcttgtattggagtaatatttatctaaccattcatcagttcctccgtaacccaggcaagtacaagtccgtctctgccttcgcgccgatcacgaacccgacgaactgcccctggggccagaaggcgttcaagggctacttcggcgatgatcagcaggataagtggaaggagcacgatgctaccgagttgattaagaagtggagtgggggtccgctggatatcctgattgatgtggtgagttatctcctccctttcttctgtgtatcgtaacacgtctaacctatatacagggcaccggcgacaacttctacaaacaaggccagctgctcccggagaacttcgaggccgcagcccgtgacgctggaatcgccggcttgaatgttcgctaccagcctgactatgaccactcctattataccatggctacctttgcggatgaccatgttgagcatgcggccaagtatctctttgcatagtgtgtgctctcttcttaactcctaatctcaaaaccattatgttttacttcttgtcttgcgtatttcttagtaaacgggatctgattggtttttcttttggctcaagtgggctacaggctgttcggtcgatgatctagatggtgtgagaaccgaatgagaaggtattattatgctatggatagtgcaatcatcttgcaatgctaactcaaggttaccttatgctacacattttgccggggtatgagtgacttacatcgaactttcctgaaatagctttgatgtttcgctcaagaactagttccgtaggcttgcagatcccaaagccttctggtataccgatccagctagttgggatggtgttctcgttgaaaatggggcgtattgcgtggattccaccttggccttcaataaccgtaaatcctatcagttgctcaccgtagaaattgagtgtgacggaaccccctggtagccgataccccaaaagtacatttggcctttcgggatctgcattcagcaggtcgaagccagtaatataggtctctgctccctcacgttggatagagactgctaagccgttgatagagctttctaatagaacgacttgagaaaagagcttatgttctgcccagcaaatgcggcattcattctcttttcccccatgtctgttttctggtctgctgtctctatcgcatcggaactcagtagaaacctccttccagcataactcattaagtaacccctggttcgagacaatatgctcgtccgacgttctgatcatagaacatctttctattagccatcggttatttctccaccgtcgccgtgttgcccagaggtgctcatcacaccgatcgatccttgctgtacagcggtatatgagtcgccagtttttgctctcacgttttctgggattttctgctaggcagttcagaaatccacgatctccattctgtgaaaatcttgacttccagaatgattcaattccgaacacaactgccattgctcgggatgattgccgtagtcttaggaagtcagcagtacgaagataagttgcgatttgaactcgtatctcgagaggcaggatgctaaagcagtcagagtcatgcacaactctactcttcgagccagagtgctttcgtcttttcggcatcttcgggaattgtctcgcagcatcttgaagtcccttgataatgggtcgttttgcagggcgaaaatgatgccgcaatccgagatccccgcagttgtctaggtctgttaaaaaagccggcaccaatattgccatggccacttactccaatagtctcgtcttcccggaggaggaatttccttacagacttcaaaaagcctgtttaaatcaatatcctccccttcaaattgctggaccaagagagaccagcagctctcatggactaagaaagccttgtggggcttttctatgtgcatgaaataccaagattcaagtttattaggatcaccgaacgcttcttcaaccacccagtcaaacttggttttattaacacctgacagttggattccgcttctggtccgatatactatggtggatgagcccggtgcaagaagtgtacttataacatagggatcaaactcacatactcggtaccttgccatccaaggagcctcagggcaaatagttgctgcgcaagatacacagtgactggaataatcagaatcactgttctccgtaagtaagctcatctggaaaaatttgagaaggacaatctgatgtgggggcagagatctataaatatgccaatctgtagaggggtcactatgacctcagtctatctatactcacttagaatgaccttattgaagataacatgacaggagaactgcagtcgaatcatctccttagataatagcccagagagcaatactaataagatagttagaagattagaagtctgacatgtgtcttccttaaattcaaacgagtgatatttgtctctgattatatttcatcccttatcacccttggaatcgtctctccttaataagtgagctcgatttactcacttcgctttattgaaacaagtgttcttccatcgctacacctatcaagcctcattggctctcgtgtccactatactgctctattgctaaacagaggctttttgttattcgtcaataagttttttcctctgcaatacccgactctaagatattgtttctcttctttctactaaatcagtagattcgacaaagaattacatcaaacagttacaagatccacttgtattgcaaggaggcgcttggcctaatgaggttagtataggtgattacctaagcaggctaaaattcacgatgtcctcggtagcctcaggcatagacgctaacctattttggctaaaatggcctccctacggcgcgccgcaacgcgaactccagaaaccaaaatcacaaagctttcaacccaactcgacctcaactctcaactacctttctcatctgctttccagtcattttacacctcttttctctgcattctatcctctcaactgctgcaattttacatacacaagctccattatgtaagatttttcgcagcggttcccgtgtctggcactgaccatcctacagggagagcttcgacaacatctacttagacctttcaaagcaacctggaaaatgcaagcttgctgaaagtggtctgggctggcgtccgtctggtggtggcgatactttcacgctcgacagcagcaacatcggtgcagcccagtggagtcgcgctgcgaaaggctttgagctgaaaatcctgtcgcgatcgtctggagtgatccaactggatggattcgaccaagaggtatactacaccgaacattttgcgaccattggcctacagactgacaaccgaaaaggacttggagcgactgagcaaagcatttaagatttggtacggcattaacgtggagacccgtgagcacgctctgcggggatggaactggggcaaggcagaattcacaaaggcagagctggcctttaacgtccaaaaccgacccgccttcgagattccttattccgaaatttcaaacaccaatttggctggaagaaatgaggtcgccgttgaatttgccctccctaccggcgacggaaacgatgccgtgacaaagcccggaagcacaaagaaccggggccgcaaggctgctgcaggccccgacgagctcgttgaaatgcgattctacattcccggaacggccgtaaagaacgacaaggcggaaggcgctgaaggcgaggaagaagataacgaggaagaggccgaggaacagaatgctgcaaatctcttctacgagacgcttatggacaaggccgagattggagacgttgccggcgatacctttgccaccttcctggatgttcttcacctcacgcccagaggtcgcttcgatattgacatgtacgaatcatccttccggttgcgcggaaagacatacgactacaagattcaatattcggccattaagaaattcttcctccttcctaagaatgacgatacccacactcttattgtgcttggtcttgatccccctctgcgacagggtcagacccgttatccttttttggttatgcagctgaagctggacgaagaaattagtcttgagatgaacatgacagagtcggtttccctgcacctactctattttacccactaacaaccttttagggatatcctgaaaggccagtacaaggacaggttgcaggcgcactatgaagagccaatccaccaagtcgtcaccaaggtcttccgtggcttatctggaaagaaggtcattatgccttccaaggatttctccaggtcagtaactgccagcttatatttgcaacacccccgaagcccgtcgctaacattcccatagccaccacggtcaccaaggcgttaagtgctcaatcaaggccaacgagggtctactgtatttcctggataagagtttgatgttcgttcctaagcccgcgacctacattcagatggagaacatcgcgattgtcacaatgtcacgtgtcggaggcgctgtttctgccagccgaactttcgacatcactgtgagcctgaaggggggcttaggtgagcaccaatttagcaacatcaaccggtaagtacccgacattttcctgtttcctggaatattctgacatgaacagcgaggagcaaaaatccctcgaggactttttcaaggccaagaacatccgcatcaagaacgagatggcagaagaggtatgtgaatcctgtttccctggtatgttgttaccgctgctaattatttcctaggctgctggacttatcgctgctgctcttgataatgatgccatgggctccagcgacgatgaagtacgacccgaccgcgggtcagcagatgaggatgagtcgtcagttgacgaagactttgctggttcttcagaatctgatgtggccgaggaatttgactcggatcacgagagtagtggtgatagcgatgaagagatgggcgatgcttccgatggaggagacgacaaaccggaggatgagcgaccgaagaagaagacgaagacagctaattagatgtacggctaggtttttcgttttctttcaaaatatccaagtctcttctagtaatacaccattctataactataggatgttactccgtatgttcctgactagtggacctcacgtgagctggtgattggcggaccaattctggggcttgttaacccctgatctcaggagaagagatatctggcaagtacacaagtaagtatacatgtacatttatgtgagtggattctgagcagtcctcgccaatagaaatctccccttgctagtcagaaatagaaatgcagtccgattgcttagaactaaagtgcagttacgagcaatttgcgggtttctacaatgtaccgaagtaaacagagtagaaaagacccgaaatatagatcaaataggagcaattcaagcagataaatagaagaaagataaaaaaataatccaatatatgagagataccagtccaaagccagaatggtaagaattgtatacttatcgaacacatcaggtgtttctacgcgggtcgatccaagccaactccagaatagctgggctccccccgacaacctctcccccctttctttcccagactggcagagtcaacctccttctctccatcctccttgttcatctttcgcttcatttcttccttctcctcttcttttcttttcctcgtctctcgcttctggtcaatttactccaaccccccccccccttttnnnnnnnnnnnnnnnnnnnnnnnnnnnnnnnnnnnnnnnnnnnnnnnnnnnnnnnnnnnnnnnnnnnnnnnnnnnnnnnnnnnnnnnnnnnnnnnnnnnnnnnnnnnnnnnnnnnnnnnnnnnnnnnnnnnnnnnnnnnnnnnnnnnnnnnnnnnnnnnnnnnnnnnnnnnnnnnnnnnnnnnnnnnnnnnnnnnnnnnnnnnnnnnnnnnnnnnnnnnnnnnnnnnnnnnnnnnnnnnnnnnnnnnnnnnnnnnnnnnnnccacccccccccccccctttttttttggaaacaattccaggtacattccctctgctccccgattttttttcccctatcgcgacaattcgaccccactgaagattaggagaggtgactgacgacatttatcatctaggggatcttaattcagttttacatatcctaaatccccggctttcgcaatgtgtaagctatcccacccgtgatgagacagataatctcgaggctcttccaagacaagatactgataggtctttgaagcttcgccacctgcgagcagctcccccgtcgcgtctcccgtcgcatcgagggactctcctactcccaacaacggcacggagtcgcctttcgtcgagcgcagcaaccctatgggctctggtatcgcccagaccgtcagctcccgcgatcccaaggccgcagctcaggccgccaccgacatgaagaacgtggtccgccgcaagctgactggctacgtcggtttcgccaacctgcccaaccagtggcatcgcaagagtgtccgtaaaggcttcaacttcaatgtcatggttgtcggtaagttggacagataatatttccatggaccaagctcatatccatcaggtgaatctggtctcggaaagtccaccctcgtgaacaccctgttcaacacctcgctctaccccccgaaggagcgcaccggtcctaatgccgatatcatccccaagaccgtgtctatccaatcgaccagcgccgacattgaagagaatggtgtgcgtctccgcctgagtgtgattgatacccccggattcggtgactttgtcaacaacgatgactcctggcgcccgattgtcgagaacatcgagcagcgatacgacacctacctggaggccgagaacaaggtcaaccgcagtaacattgtcgacaaccgcatccatgcgtgtgtctacttcatccagcctactggccactccctgaagcctctggatatcgaggtgatgcgccgcctgcacaccaaggtcaacttaatccccgtcattgccaaggccgataccttgaccgacgatgaggttgcccttttcaagcagcgtgtaagtttttgggattccctttctgaatcgattgaagctgtgcatactgactcttctagatccttgccgatatcgaacaacactccctccagatcttcgaaggcccccgctacgagcttgacgacgaggagaccattgctgagaaccaggagatcatgtccaaggttccctttgctgttgttggtgccaactccgaggtcaccactgctgacggtcgtcgtgtccgtggccgtagctacccctggggtatcatcgaggtcgacaacgaggagcactgtgactttgtcaagctgcgccagatgctgatccgtacccacatggaagaactcaaggagcacacgaacaacttcttgtacgagaactaccggtccgagaagctcacccttatgggtgttgcccaggaccccagcgtcttcaaggaggtcaaccctgccgtcaagcaggaggaggagcgtgccctgcacgagcagaagctggccaagatggaagccgaaatgaagatggtcttccagcagaaggtcgccgaaaaagaaagcaagctcaaacagagcgaagacgaactctatgcccgacatcgcgagatgaaggatcagctagatcgccagcgtggagaactcgaggagaagaagggtcgcctcgagactggacggcccgtcgaagagaagggcaagcgaaagggcttctctcttcgctaatgtccatgtccctgccattgcttttgcttctgcctatacttttggcaactgatcctactctcgttccattttttcccttacacttgtcacccatcacactcccttaccatcccataacgcaactgcttactctggatgggtccacgcaccgaaaaaagaatgggggtttttcttcttaccgattgattgataatacgatcctgcgagggtcagcctgggacctttcacttcttgtgatgtactttttgctacgccatatcttgtcttgccgcttttctgtgtgccctattacccgctcatttcattattttcttagtgtttgggacatttggttgttcgccgcctgtccgtgtgttagtcaattcagcgcttttagctttagattttgcagttcgagtaaacagtaagcagcaacagtatcaagctaactaattaagaaggggaagagaatcggaaaataatctcaaggggtaagatgattctcctaataagattccttccgtttcctgagtttatattagttaggcccaagcagtaagcatacaatatattcaacctgaaatctcccagacctaggtgtcagatctggatgaaacaagtacaacattaataccttttctatcaagtataacatccttcaaagtccctacctctgttatgacccaaaatatatacctatggacctacaacctatatactacacctcctagtatagattatacagacatatcaactatgtcaattatgtcatctaatggaccgcaacggaactaatcatctagaacgtactccgtatgccccagaggcatgcgtagatcgtggagtctaattctatatttaagcgaaacaacacggggctctggagcatttctgcgacaaaacattgggacccgcttggtgatttagctcaacattgtacatagtattctaagactatattaatccatatcgaggtacctatacaatatagacgagtacattgtagataggtatggaaagaattgacattagggaatactttggtatcaaaagggacttcaaggggatgtgacttcacagacaataagggcagtgctaaatactatgtattttgtatgtatactccgtacatgatcgtcattaccggcaaattagtcgtacgacggagattccccttgcccttataattgtgaacagactattatacgcataaacctgaggatgtattggacctacaatcgaagcctcaattgcagccgttccctttccatcagtacttaatactattcttgtcaacaacatcaggacctttgatatcacacatccactgtctatagggctccactatttaaacgggaggctggcaatcgccctcctcattggttgttcgtgagctgtgaggtgcattagcgtggtggtccttgtatttttaatttgggaggtgtatggaggtgtaatttgaagtatcgccgtttcaatttcgaaaacaagctgggccttcccctgggttcccttcaccttcatattcagtcattcgttgttattcaaatgcagtgaggcttcagtctcgagcatgattcattcatttacattcctttgcttttaagctcttttttcccatgccacattccttatcaattttcttttctccacgcgttgcggcctgacggcctccctgaattccttagactgcacaaccctgtctagtcttcccacactcgcttcagccatttcagccatttcaactggccaactacactcctattgcccgtcgtcgctcccactacaatgaggatctcttcattgtttgggcccgcgacggccggctggccctcgctcctcgcgcttttaccgactctcaacgccctgtcattcgagtcagtctccatcccggaactggacctcagctcgctgggacgggtatcaatcactggtgatttcgatggcgtttctctctatcaatataaggaacagaccgaatcgattcccgatggcacccaaggtcttctgaccccgctaccgaacggcattctcacgaatctctcgtccaccaatgcgcatatcatggcaatgtgcccctttaccaaaaaggatggatctttcgcaggtatatttgttgggggtaacttcaccagcctaggcggagtagactcgcccggtgctgctctcttcgacccgaataccagcaaagttactgccttaccgggcctttcgggctcggtagcggccgtgacttgcgatcaggacactaaccgcgtctacattggaggaaaattcacccacgacaacacgacgaacgccatcgcgtgggcgcccgacaatggctggactaacctcccgttcaatggcctgaatggccctgtcagctcgattttgaaagctgacaacggccatatcatctttggaggatcattcgatgccctgggaaacagcacgagcaacagcacccgcaacagcaccagctcctcaaacgaaagacaaatcctcaaccttcaaaatgcgaccgtcacatccgatgcagactcttccttggacggctactccgatcctcgtaacatcatttgctcgacaaccggggtggcggccaaaggcaagacctatcttctacacgactatgcgccgggattttggagagcagacctcgggttcgacttttttccgactaaaattcgcctgtacaacactcacttagatggacgcggcaccaaggactttttacttcgagcgctccccgacactggtatcatgaatctgacttacatcgacgagtcaggaaaaaagaccagctgtgactcgtcctgcccgctttccagcagcacgaatgaaacctaccgtgaatttaccatggtcaatcccgttggtatgcgaggattccagattgaggtgcttagttggtacggacaaggagctggcctgaacggcattgaggtcttccaggaccaaatcctcacatacgctgtcgatcaatacaatgaaccaacatgctcaggcattgaataccccgccaagtcaacgcgcactggctcttggactgtcgagtctgggtatgtgtctgcgaaggtgaccaactctaatgcctcgaccacatccgtcacatttgagcctgacgtgaaagagtctggcaactataccatcaagttatatactcccggctgtacccaggacaactcttgcagctcacggggtattgttaatgtcacggctacactcacgaatggatctgactctagccagcccgatccgtcatatttttaccagaccaacctacacgacaagtatgacacattctacactgggtatgttgatgccaacagtgactccttccgaccaaaggttacggtgcgggccaaggacggccaaggagatatcaccattgtggcgtctcgtgtccgttttgaactactttccagcaataagagcaccaaaagcaccaagagcactaagagcaccgggggtctcaatggattatacgattatgatccgaccgcaaacactactgaaacttcaaatcttacaaagtccgacattaacaaggcggggacttcactcgaccataacgcaaccatctcaataatgaaggagcatgatgatgtgatctatgtcgctggcaacttctctgacagcaagatccaccacgtcatgtcgatcacggatggcaatgtcacagcaatgcccggctctggtttgaactctccagtactagcaatggccacccttgacaatttcctgtatgttggaggtcgcttcaccgatacctcagacgcaggttcaacgggccttcaacacgttgcggcatactcatactcttccaaagaatggtcggccctgggagcagggctgaacggtcctgtcaattcgatttggcctgttggattgaatgcatcaactgctatcaatgaaaccatccttgctgtgagcggcgactttgaccagatcattgctttcaacgggaatcccgcggtatctgttgctgggttcgccatatgggtcccctcccgtaaggactggctccagaaccttaatgttacacagatgcagttcggtggtcaactctcaagtgtcgcttcgcacaacaatacgctcatcttggcaggtgaccttgccaccaatggtatcatcgctggtggtgcggtgtcactgctaaatcccgatgatttgcaactgattcctctgtcgatgaagatcaaccacaaaaattcaagcactggtctgatcaccggtgcttatgataccagttcgaaccgcaatctcacgatctacggtggacatttcgctgccgctggcagcaatggatcaaccattgaaaatattgccatcctcaacggcaccgatgagaagatatcaggtctgccgcaaggcgtcgacagtaactcaacgtttatttcaatgcttgtgtacaacgacaccctctatgcaggtggaaatgttaccggaaacatcggtcgcaccagtctgcggggtcttgtggtttacgacctggaaaagaaagagttcgcacagactcagtcggctttctcgggctggaatgtctcagtcaatgctgtcgtcaatcgaccggattcatctgatatctactttggaggaaacttcgaaggtgtagggcagttcccatgtaattctgtctgctatgtggatgccaccaccggggaatgggatcaacctggctcgtccctaagtggtaccgtgattgaccttcactgggccagtcaaaagacgctgatggctgtgggcgaccttcaggtcggtggtaacaagacctcaattgctctctacaacgcgaaatccgaaacatggtcctctttctctggagcatccgagtcagatttgcccggaaatgtcactacgtttactgctgctagctcggatttgtcaaagttctggatcggaggtactgcggccaatggctcggccttcttcttgagctacgatggttccgagttcctatcccccggtaaccttttctccgagggcacggtcattcgtggtttagagattctccctgtcagccacgaccattctgcggctgctctgttgaataacgatcagactttgttgatcatgggttcgcttgtgatcccgaacttcggacatgcatcagcggcgctctacaacggaaccgatatcactccatttatcctttcccagcaagccgatggccgaccgggcagcatgtcgaagttcttatccgagaacaaaaacccttacactaccaccagtgagtttacttcacctttcgttcttgacaggaatcaatactgactttgacaacctagcaaaacatcactccaatggcatcgcagtcttggtggctttctgctgtgctctgggctgcgtcttcctcatcgtcctagccggtgtcatccttaataaggtacagcgccgccgccagggctacgcagctgcccctcaaaccttcggcaccgatcgaccatccgacatgcagcgcctgccgcctgagtatctcttcaactcgctgcaccatcccaaccctggtgccccggtcctttaatgccccttttcgctccaaaacccttgaccttcgaggccggcgtttcgtttcgtttttgttctgttctgttcttttctgttttgtttcgttttatcttaagcaacgttgctatacccaaccgtctttaatgtctgtgtttgttttcgcgccggccatatcgcgatttatcttcaaattcttttatttcctggctcctggcacatgtggccgatacagtttatcaaagctcctttgtgaatatgtctgtgttgatgtaccatatgctttccagcgatttatatcttacttgagtggatgtgtgttgctagggaggttggagatgtgtagatagccacgcttcgttcgtggacacgacaattaatacaatacccctttgctgatggaaatattctcaatagacatgtaactatagttattactatgctatgctaggtagcaatgtctaattatatccaaacgcataggcccattctcctttaatctacacctgagcacctgacttcgggagcacagcctgtctgagtcaggttatttgtgtgggggccccaggtcacctgttccctccccgcaggttgatctccaggttttcgtttccccaacccgatcactttctttatttcgcatgttgctaccgcatcgccttcatgtaatatcggtatgcgatcacgaaccggctggtaagtgcatatccaactagcgtgatacatggctaacacaacctagcttaacgtgtcgaacacgaaagcttaaatgtaggaatcggttctcccggccgtttcattgtctggtgactaaattaatttataggtgatgaagaaaagcccgaatgttcacaatgtcgcaaaggtggccgagaatgtcgcccgagcgaaggagtggttttccgccatcaacagaacgcctcgatgaaccggaactccccagacggtcggggtagtctcaacgggttctattcatataagaacacctttgacaaggatagcgtttggctggatgttcccaaacatggtacggcaccaatgggacatgttgtttgggtctggaccctttttggacggtagctcatatcctctgcagtgatctttgtcgacaactccgatccatacgccgacgacctcgaggcctcattactagacccgggcagcgcagcgcaaacaaactctccgaatcacagatgggacagtggaggccctcgagcgagcgatgccgagacacaggggttggaagccttgtcggcggtcgcaacacacgatcgcttcccttattctcccttggaccattcgatctctgatagtacctcctatacctccccaaacccgcaacggagtgctgctatcaccccggcttcaccctcaatatcgctgtcgtccaccagcaataataccaacattaatttcctcctcaaccccgcgcattcgatgtccccatccatcgacccaagtatgcagctatctgaccggaacaatgcgcttccatcaagaccggcagcttcacaaagaagcatgagccacatgagtcacatgagccttgtcaatcacacaacagacgacaattcagagaccgatttcgagaccgctttccttctgcggcattactcagaaggaccgggactgtggtatgtttccttccagctgttaacgtggaaccatcagtaataatgatatctgcaggatggatctctttgacctagggacatatttcgcttcatacgtcccagtgcgagcacgaaccaacccgctcttgaaattcgccgcctgtgcatattccgccaaacagctaggccgagtcaaaggtgccaaggcatcggtgggcggagtctgcacccagcagtctgccatggaactgtggcctgacaaagaccccgacttcgcatggtatggggccaaatattatgaaaaggccatccagctgctaatgaaagagctgcaacctgacgcagagggtccacctcctttgagcacccctgaagctttcggtcaatggcaggctgccgagatttctgtagattcggataacccacgtaagcgccgcagacgggtttctgatagtcggctctcgcatggggttcattccgacgaggtgctcgcggcgacgaccattctgtctgtttatgagttccttgatgccgcaggccccgcgtggaatcgtcatttgagtggcgtgaagtcgttgcttgatgtcgctgaagtgggcatgatgcctcttgagcagcgtccgtctccgggagagagctcatatcagacgcagacgcctaagaagtcgggtctttccaaggctcggaaggcaacgttttggaattttgcgcggcaggactacttagctgcctgtgagtgttgtctgtcgcttcccctcccctccaaacttcgctgacagaaaaaaagtcatcaacgaatgccatacacggctcaacacagacgatacagtcctctggaccgaagcagggttacttctcgacaacgcgggctttgtacgcgctagcaacacaagcgcagcaggatatccggaaggtgaagatgtaatgaaagaagacctaatcagcaacggactagtgtggatattgtccaagatagtcaatttcataagctctggcgacaacctgcacataagcggatccgtgccaggacccttgggcgtctcgcaacaagccctcctggagcggtggtacaggcttgaatccgagctcgacgcatggtacaccgggatcccagagacattccggccctgcgcccgaatcgacgcatccaatctcacacaccaccggccgcccgacgaacacgaagacatctccaccctccaggaaatctggtacagccttcccatgtgcgcctccgccatgcagcattaccacatggcgcgcatcctgcttctcatcaacaagccgcacgagtccactagccggcgcagcaccataacgctccgtctccagtcataccgctccatcgagtctgagatcgcattccacagccgtgagatcgtgggtatcggtctttctcgcccggatggaagcgtcaggatcaactcgctgcagccgctatttgttagcgggcagtgcctgacggacccgcgtgagcgccgcactaccgtgcgtctgctgaggagtattgagtcggatttaggctgggcgactgagtaccgtgtgcagcaattgctgaaggagtgggggtgggatgagaattcgacccgctcgcctggtgcttcttgttcttgagacttgaagacaagacaaggtctccagcctaggaactagacatagtgtccgggttgaggtttggcgcgggctcaaccacgttcattgtatagtacccagtccctcttggtcggtcctgtattggagccgatgaaatcatccgagggtactggagtgaagtggtatttgcagatatctcggcttatgtcgaattgtggccatgcattccaatcttgtcaccaccacatgccatgctgagaatgacttgtcaaacgacaagcgactgggaattcccgtcactcattaggggatgtgccctctcacgtggtgtgacgaatgccagagacacgagtaatgattgtttatgatacccgtgtacctctgatagtaatcatagtatagtacaggtgactctcacactgcaacataggcagtatagccatagagtggacagatggattctaaagaaaaagaaaaccagaaatctcgttagatttagggtcgagagcctttccttgtttgattctgcaagttcggtttagttgcctttggaagacactaaacgtggtatacatattatcataacccaggcgtgttcatttgagattatatactctatattacttacatgattgttctctagctctaactaatctaattacgaaaaaaaaataaacacccattaacttactatttaactaacaccccaatctccaacaccaaccataaacccatccagccctaatccaaaccccaacctcaacgctgcaggttttccgttgaccatggtgtcaccgaatccacttccccccaccgatttacccttcttaggttccgggggggcaacttatccgaaccaggacaccccagatccgacattattcaggatctactccgtacgtgcaggaatatatcgggttactagtatcggctattccgtgcataattcatgatgggtaggattctggggattgggtcggaatacaacatacaacatacaacttagagactagagaatggaaagttgagcgttgcagaatggggtagaaagaggtatttatagcggatttatgttggtcgctgtgggcgagttggagatttagttgagacattttgtaagcttgaatattacgagcttacttggacttgggtttgcggtgagcccagacttcatctattatttagaatttcgagcgctgcggtagcaatgtaagcgcaaattcaacagagataaatttgagcttgtatgtttgatttttgtcaagtggttgggtggtttacttctacttatttaggttgggaagaatacgaagtgggggatcaggagatatttcttcttgctttggttaatggtagcaatcacctagcctctttgtatttcggcaaaatgaggataatctctagcgtgaagactattctgacctgtgggttctttttctgtcttttcttcggtttcaccacgagccagtgggtcgatgcggacgggaaaagcagcgagtcagattgagcttcgagctaggactcaactacgccaaaggccgaaatcacgtatacaaaagaaccctggtaaaaccaaggtggcaagaactacaggtggagttctgtgatttgatgtgggctatgcttgagcgaggtgttgtatatcactcataagtggatgatcgtgagaaagcgcgaaagaccaagatgcaaaggtgttttctgactggcttaacggtcgggggtccgtgaatagcgctaagtgtgatgatgacaagaggacgccggtgtgatttgagctagaaccagctactttgtccgtgcatatcatgaacgtatttccgcaggatgtagatcatagactatatatgtctagtgaaagtgaataagcctgctaatctatccttaaataagatctacaggagggtcgggatatgaacgggttagcgtgggattcgagagttttacaaagtactccgatgcatttcaatcacctcgttaagcacttcattgtgatagatcggctggctgcatacagagtacagaaatatcatgcggtggtctcttagcatccgattggactcatgtacgacgaatgccggtagtgatcacagcgggagatgcgttagtcgtaatgattgggtggattaacgcgtgggctctcggggaggaatgctattgttggtgagactgaccactctggcccctctgacccctcggtgctacatacaatagacagactttgatgtccaggggtaaaaaggcaatcgaatcaggatgaagaggggagtggttggacatgggttcttgagctcagctccgcaatttgcatagttgtgtatttcattcaacattagcattgtcttattgttttattatattagttattatatatgggatattatagctcactaagactaaataataagacgatatcccgactgttcttgtattgtcactgtattttatccccgctaaaccaccgtgccaagaccgaattgagtttgcgaggaccgtgggtcgacttggtcctaccgggtaaatgtgattgcaagggtttatgtattgtattattatagttagttactagctaaacactattagcacactgcatatggtcacatcccggctagactttgagagaacccttctagactattgctggatgcgtcgggtggaaactcctcgcgtgcgctgctgccaagggtccgggattacatgtgggattcttttattccaactttggaaggttgtagctatatagcggatttcctctgccacttcttgacgtcccctttccgttttagtgctcagaccttgccgctttttgctcagagtacaactgagcacgcccctgagcggtctgatccgctcactgagcattacataagcacccagatctgctcacgtgcagccctccatttttagatggcacccatcgtcccatcaatgtgatcttcaatcctggtaaaatgactgcaattatttgcataatggagcttgccatttggacacccaataagcactaccatgaatccatacgggatcacctcaagcagaatcatagtactattattgattgcattctcccctcttcaggagtccgggtcgctgaagctgggtcatttaagtctttttcaggtagagccggtggactttcgatgatcattgagaactgacgtatattcaaggtgacgtgatcatgtcttgcaagtgcaagtggaaatgtatgtatagtatacgtacatatcaaaacccaccctctgcgtccagtcaccacatcgaggccgttttcctctgccgttgaagtttgagtttgagtgaagaattttcctccgcaattttcttaagtacagcaatggttatatctggtatatctgtcataatcaccatactttcatcgtaggcgaggaactcctgcgcatcgcatgagattgacttaattatggcgtctcgaatctcgctctcaagaggcggaatggtgatccagatttgttgcacaatcaatggaaatccccttgcgttttcggagatccaattcataattcgagatctcgcaaggattttcagtcgcgaaatgtcaaacttgtcggccgccatgaacactccgaggttgttccacatagctgcatgaggttccataccattaccagaagcgcacttccgattttgaaagtacgagccatctgtgtcttcgtagtcttggtggtatagaaaagagacaacccgttgaatagttgcaagctcatcatctggcagatcaacatgtgatagcgaggcttccttgtaaaaaagttagccatatgcagcgatcacggcaaaggcttgtcgcattactctgaatcctcctttgactgcagcgtcaaaaaagggtgattgtgaacagactatcgcacgatgtacctggaacttctgtccttcgcatgatatcgccaggtctgagtatctacctgaatccagaaggctttgcaagattggttggagatctggaaaccccatgattgatgtagctacatgtaggccaagttcaactcgattctagcatatatcaattctactctatcattgaagactatgacgtcaacactaagatcgtttgctgaggagtgggtcatcctgaaattagcttgaacacacttgatcatctctagacccaccgctaagatctatcattgagggtcggtctcagaaagtcagaaggacgcaccatgtatagctctgtatcttactacatcgtgttaggtccccgccgttaagctctatttgttgaatgtaccgtacgagcggcacattacgatatctctcaagttaatgcgtgtttacggcggcttttaactggaccaaggggtgcacagacaccggcggtctgatagagcaattttgttcagttataaaggtgcaactgattgggttgtgcgtcttactttctacatctgccttttcagaaagtaatttgcctttctccctcgaatcactacgatgtgagtgattatttgctgttggcatatctcaacaattgacactgcatagtgcgttccagaatgccgactctgccaatcgttaacatggaactgcagtttctggagatgagagagacctacgaagactcaggttgtgggttccagttcgcagggactctcgttgtgtatcaggtgcagggccttttgtaccatgcaaagctgaaaggccgttgctcttctccttcgattgtcaatgcagaggaccttatgaacgttaagcaaattcctgcgtcggcctacgatcccaaatttcctgtcggatttacgctatcgcctggatccctacctaacggttgtcatgtcaaaaaaccccgattgatcaattgcgatcggattagtgaaggacctcaaccgaatttgattgcagaagatatcctcagggaagcaaggatttacgaactcttaacgttacacccacatcctaacattgctacctacctcggttgccaagtttctgacggcacaatcacgggactttgccttaagaaataccctcataccttgatgaaagaagtcaacccgggcgctctcaaaaagagagcacttagaaacatgcggaaagcgaagggggaatacagtcatttcctcacgggcattgaaaatggcatccagcaccttcactcgttggggttggttcataacgatatcaatccaagcaacataatgatcgatgaggatagagcaatcatcatcgattttggatcttgccggaagctaggagagagcttagaaaatgtgggccgtacctacgaatggtgcgatgacaaagttagaagtctcttctagagaatgacttgaacgccttggaagaaattcgcatttggcttggcgttagttcacaagaattccaatttgatgaatagttcaattcatttgaaaatctgagccattcttcggatccaatggggaggtctcgatcaatatgcctggctgttgagaaggctgctaaagatactatctttccggccagcaagtttcccgggcccatccatctctatcacctttccctgatctagaacgaggactaaatcatgatccatgagcgtatggacacggtgtgccacagtaagagccgtgcatgaatgaaacggctcgcgtcgcagaagagcctgaacatgagcgtccgtttccatgtcgacaccgctagttgcttcatcgatcagcaggatcttggcgttgctcgcctgtatcttcagtattgcacgggcaagctccagcaattgttgttggcctctcgatagagataaagtattagttatctcagcttccagtccacccctgtcatccaacacgcccttccaaatccctactcggtctagggccgcgatgatatctgcatcggggaactttcctgtggggtctgtgttcaacctgactgtacagcccaccataatgaatggatcctgaggaatggtgacgatcctttctctgaccctttcaggttggagggtggcaagatcgacgttgtcgatcagaattgatccattcgtgatagtgagtatgcccaaaattgcggataatagggagctctttccactaatttctcatgacggaagggtcaggccagatcctcaatatttcaccgggtagattacgcagagctgaaacttacctcccagtgcgcccacaaatgccgatcttctgaccaggagaggccacgagagagacactcttcaaagcaatagctttcggactgttcaatctcagtttagtgacctgggtgaaatatactcatttgtctgtgaagttcttactggtactgtgcactaacttccgagacgtgaattgcgccccgatctggccaatcgctaggtggttccgtttttccgcttgtgacttcgctgggaacctccatttcaaaatctttgactcgtgagattgaaccaagtgatatctcaagttgtgtccagcccgatattaaagatgagagacttccgttgaatgctaacgatgtttagtcagacaggcaaagacgataggttgaagcatttgatagaagaatgaagagaatggagaacagtttcatggtcagacatgacttacagaggatgctgtttagtgaaactccgagtaatcccacactagtcttctgcctcaaaaataccgctaggctaacgacaataatcgcttctgcggcaacaatcagatccaggaccagattcagccaacgttggatgcaatttagcatatagtatgtgcgttgggtgacatctaatagtcttgagttcttgttctggaagtcttcttcccacccaaatgcttgaattgtagcaaggccctcgactgtatcaaggaaatgagagtacagtgggcttctgctttcgaggtccagaagtcggagctgtcgtgatgtttttagataaacatgctgtagcaaaaagacagcaaatatcaagaaagggagggagatagccatgtattccgatcccgtagcaatgagtgcagcgctagcaattgatgagaaaagatctttaatcataagcatgcatatctctaaagttaaaggtgcccatgataatcgatagatctcatagcgagatcaaggtagggatgggacaagtcgtgaaagatttagggaagcgagacttacttgaaactgtgatcaacacgccgataggcaattgactttctacgagggtcatgtcttggctgaatcggttcaatattgacccattgtcaactgttgaaaggaactgcggtgtcgcccttcagagatcatcagcagacgaagacccgaaaagatagaatcatcatacctaataacggtcctcagcacgacatagtgaaggcggcgtgccgttgcgggcgaaattaggatcaagatagcccttttaagtcgtaagcaattggttgtttatgactgggctctatggagacctcttaacataccaaacgtagccaccattcccgatagtgttgcaaatcgcgaggaggaagtatattgtgacatataacggcttttgacctccgccgcggttagcccaccgctcaagccagatctctatgtgcaaagcaatgtcagtggacatgcaaggagtagtggaatatgaagtttcacgtactgccgtatgtactggcgaagacattgatagtcacgaaggaaacaaaaatcatggccttcgtccagccgatgtagcgcaaatagtacctataaacagccgagtctcccgttgctcttctgagatcattaatatcattcgctttagagatctcggctgctttctctttcatcatcgactttgtactttcctccaagccctcatctgctgcagcatcgggtagcagagcttggtagacggttctctcgcgggcctcttcccggcgaagattcccgtccgaaagagccagaacttgatccgcataagatagataatcaactgtcgagtggtcagtgcacaacactagggatttgcggcatcggggctgttaaagggagccctactctcatgagtcaccatcacaacggtcgacattgttcttcgcagaagtccgtcacctccgaagagacgctccattatgatggcctttgttttccggtctagtgcactgagtacatcatctaacaacaaaagtttcctacgggcatacacagcccgtgcaagggcaattcgatgcatttgaccgccgctgaacttattcccggatccattgccgatttgcgtggcatcaccctcaggaaacaattccaggtctggaagcagagcacatgcatgaagaacgtccgcataccattcacagtcaataccgtgagtggttactgatcctgtagcagttaccccgcaaattgcttctcggatggtgcccctcgggatccaggggatttgcgcgcaaagggtcgggtttttgatttttactgtagttacccctttctcgcaaactgcttggctaagtatagcccgaagcagagttgttttcccggatcccactggtccccgaatgattactagatttccagctggaacttggatgctgatatcccgcagtactatctttgccgatggaactgggcggatattgactcgttccataaatatgacggggaatgtaggatcagcagtgccgctgctcaagaatgatatgggttgcagctcaccagagctatcgctcatgtgaatgtgagtttcttccgtggtaatagaagttgtatctgggtgatgctgaccagtcggcaccatgagaaatgattggattctatcaaagcatcccgtagcggccgccgtggaaggaaccgcactaagcagcttagaggccgggctagtgagaagtgttataattgacagactgctgagggtcttgctaacatcaagttcctttccttgagcagcgtagactgtgaaggtcaaagctggtgccaatgcccatggtagattctggattatgttttgccaaacgatgctccatcgatatttggccatttgatgagtttcttggactcgtttgttctgtatgatatgaagaaaggtcttactcaaccccatccgcttaacagtttggatatcagccagcattgaacgggtgattgcgatgcgctgctgaacagcatcaacccaatttttctgctgcccaccaatattcttcgagatatatgtgctccctaggctagatactatgcaaaattatcagcaaccggtagcgtgatgtgaagtgattgggatacccacggatcacgataatcaatggcatcagacaaacccatcccatacgaagagcaagcagcgaaatgccaatcgcgacctcaatagtacgagcccagcattcattcaaagtcactaggcaatcgataatccggtcaatgtcggtggtcatgagagtaattgtggccgaacgatcctctagtgccccatcggggatgcgcaacgcatggtcatagatcatcgacgaagcggcccctcggaaaattgtcgtgaaccgatttagcatgtggttatacgacagtgtagaaagagccatgcccaggtatatgagaatagtggcgccgataagaccgtagccgtcgttcaacgcggtagatggatcatcaagccagttaagcatggaagtgatcaggaagggttgcgcaaaagtaaatcctatcaaacacagtcgaggaaataccactagtgccagtgaggccctgagagcccgacacatctgcactgggaattcgaagcggcgtgccgggtgctggcgttggatccaagcttgccgcgccttctcggccgcgcccgcagattccagaggcttatccagaacatccagatcccccacagtgagcaaagatcgaaaaccagcatggaaaagacggttcaaccaccacagaaaggaccggttcaagataccactcgttgactctggtggcagatcacgatacgtaccagtgaggtacttctgcttccccagactctccagaagaagcatcgtcatctttgcagcaacactggccgtaaatagactgggaatgagacttccagtgcgggataaccagagagttctggtctgcacaatgtcgaagagtagcgtgaggacaagatagatggcgaggagtgatgacggcctgactgatcgctcatcctccatccacgatatgactaaaatctccaatgccactgcaagattgatcgcgccagatgccacggagatatatgtaaaaggcttagcattctgtgcccagctaatgagcagggcgagttggattgcggcaaacacgacgatagttatctgtgctatgatatgagttggacctccaaggtaaaggtgtggaagttctcaccagttttgcagatctcaatttgttaaactggattcggacatcgcatttcgcgagaatatgtagtcgaacaggagaaatgatgagaaacgcgaccgcagggacgaggccgaatatcgcttgctcgaacagaagggtgaaatcaaagccatcgcgacacccaggattcgtcacggggccgaaactattgtccgcctcaagcgggcaccctaaaggtatcatgctgtgtctatctctctaaatcgcatgaaaaaggagagggaaagatgagaagttgacttttgaatgagctagtaagctcctgccgcgtgatcgagggccttatcagatatgtttctccgtactctgtacatacggcgaaaatgatttaattggctgggtactttggtttaatttgttttgttttcgcagatctccaaggctattcaaaatattggtttcgaaaactacgtaaactaaaagatggccgacgtaaccaactatagaatctcatgccttgaaagttgacaccttcgtttgaaatcagtgtcagcttggcatgcctgtaatttatctctttttgcatcaaaggacgggctacggcttcttcggcgatacccgtttatgctgcagatcgacgctacttacaagacgtgttctactaaacagataaattaaaggcatgccaaatttacaatttttcttcctccgccggaagggtctcattgccgcggtagaaatgccagtccattctctgcaggaacttggtgactaggtcagcgaggtagcattcagggcgctgccaggcccacggcatggaatcgaaaatgcctctctgatggatctgctacagctaccgaactcatccccagtcgctggactcgaaggaggacgtgaacttcccgtttccaacttctctcgcatggctgcaatttcgtcacttgccctgcgagtgatacctccgacggacgagagcgtagcaaagttgatgcttccaagtatgaatgagagaatattaaatagaaataggacgccagtgcggacgaggaagcggttttggagccgggtccccatcgatccgtccttcgtctcgttccgggcatttatcgtccacgccatttaaaaggggtcatattgatccaggctgtcattcccaatgctcgagaatgctgctcctgaaaaatgacaggctttggcagtccctcgttgttcaaaatttccgatgtagtttggtaccgagcatttttgtgtagtcggatgagaagaaaaccttaaagactggagcacaagaaaagtacgaggggcgagctcagctcccgaggggaagacaacacagatgtctcaactatccacgcatagtctgtgacccaagatgggaccgggtatccgtatacagaaatcggatgggtcgcgatgaaatcaacgaggctattggccagcctcctatcgaaataagaagcttgttcttattaccgcttccccactattgcttatgttccagcactgctcgcttaaattcgagagcctagagccctacaccggagtccccacgggcgtccgttgatagcccggccccacacatacgatccctgcctgatactacctaggttaatggattatatatatttttcgtaggtatcttaccctactaagcccttgtatcaaaggtcttattgctataaaacccaactttataaagattataaaggataaaatacttatagagttaagtttagtgttaacttattagggatcgtgtaacttcccggggaaccgtgtggggccgggctatcaaccgacgcccgtggggactccggtgtagggctctaggctcaagcgtgcagtgctggaacataagcaatagtgggaaagcggtaataagaagaagcttcttatttcgataggaggctggccaatagcttcgttgattctggcacacctttccaagggttccaagtcactccactgaaagctttcaatcggttgaaaaaagtaactaatgttgtgatgagtggctttattgtatttgatcgtcaacatatatgcaaaacacttctcattattcattgtatagagggaaaattgagaggtttcagtacgctatctgttttacctcgcccgctatcaagtacaggagtgggtccaaacaaactcaaaattatgggacttacatgaaatcgatgggccagcgagggcgggactaggcagctggaactatcggaaagtttccatgggggatctcttgttgcctaacatgcttagctacttctgtaatgagtgagcatgatgtgtacgtgtcccttttgaagtagaactcgggcgtactgttctatggagtacatccttgcgctccctgtcaggctaaaccaccaatttatctttacgcgattcccgcagttacggcattatttcatcataatacggagtacaatatttctattttctataatccattatccggacttcccaccagaaagtaatatcggacatgagattgagtccttccggccccgtcgtgaagtactaccccaatgcgggatcagttgacaacggctattcagctccttttgtgagaaataatcctcgtagactgagaaaggcattctttctgattcgagctatacatcttagatctttattaaagcgtggcacatggattgattatgtacctagtatgtagctaggaatataaggataccaagataattatattgtcactttgttctcaaatgatgttgtctatatacgataatagatacaaatagtgggcgaacaaaatatacaaacaaatgaataccctccctatctcccgtagcttgacaagacttcacgccacgccaccatttccttaactgtagactaatggtttctgaatgttcctaggccttgtcgacatatcaagcggcaatgtcatgatcctgggctttatgataaccatgaacctccatgaactccctgactgcggtctaaacagtatctcagcattccataaattggagtatggccatgtgcatctgcagcagacttaccttgcttgtgcaaacatgagggatgcccttcccgtctacttggtatcgtcttccatcttcctctgttcttggccactccacggtcatgtcggcaggacattcgaatgcttgcctcagatagtcaaaacagtggccggtgtgctcattttgaatttgtttattcgcttgatccctcatcgtcgcaggatcatccacctttttgttttcacggtttataccacaatatttttccttctatgggataactcacctccaacatgtccatcgacaaagggccatgagtttctccttgacacttacagtcagtatggtcccatgggtttgaaaaaatcttgctaaagagaaaatctaggtcctgcgcgggaggcactgaagtgggaaccgaggacgtttgaaaaccagcttgagatatcaaatccatttaaaggaccacccagaccagaattagaggaggcatggcacaaacttctaaatccggccgctgctattcgtgtggataaagaagtactcgaccgaattaaccggacttctgttgctctccaagacggatcgggctatatggttggtctggatgtctatcatcaactgcattgcctggtccgtattcacaccagtgccattaggtatatcggcttctgaatcctgtactgagaagtgaacgcacagagatatatccgcagatacctccaccgggagcactacaatatgacagaggaaaacctgggtcagcatatcggtaagccttgtcactatatccatcttaatgtgagctaataccctcgaagaccattgtttggatggcttacgacagtatatcatgtgtaacgtggatgtggttctcaacacctttgactggattcccaactttcctagaccgtggccaaacttccaggttgtgcatgagtgcgtgaactgggaggccatcgaagactggaccttggcgcacagctttaatggatttgatcctgatttaatcaaacatacagatttccatcctgagctacgtaagaaatacacctaagactggagaagtggaagagacactgactgatattgatttcacttcagcgagcccattcaattacactctgagcgggaacgagccctaagatggccgggtattttgtgaaaggtataactagtccgagttagaaattgcccaaatgtatttttcccagataaattaaatgtttgagacatatctatcagccgcaagttgtattcgctcagtcgaccaggccaacacaaatccgagtcccggtaagatggtattgacagcactttgaaattcttgacagatggtaaaagcttctcattttgactgtattatttcccaatcctctaattgaaggccagtgtaaataatcttcctaagccttgcaagttcctgggggatcattgactggcgtctttaatgagagggtggggcgaagccgatatgagtccaaaagaaacagtcgaacttccttgttggcggcaatcacgtactttgtgcccaaactggccgcacgaattacatctaagaatggtccgccgccagttctgacatgtcgtaatattgttcgtctgtgactggtctatagtcgatagtcgtggtgtccgtatcttctagtatcggtgattccgggactcgttgtccgctggatgaccgtacgaataaacgtcgtataatacgtcgggttgtaataaggatctatattttccgtttgttgtgacaacagattcgctatgtctgggacgtcgtatgcgtttcctggctttcctagtctctttgctaggtctcgtcgattatgtcgttcttctacaaaaggctcctttcctgcgctttatcgtcgcttactcatcaggcgtgttctgttagttactcaagtgggtgatcaaaagtggctaggcgctctctgcaacctgttgtcggatatgaaaaatcgtgatctgttcaagttgttttcggacaaatcccgtcgcgtgcgcacatacaaacaactaatgtgtcgtaatgcattagcggaattccccaaaatccttctgcagactaagaaaatgtctcagaagaagagtcaatagcctagaaacagcctagatacatgtagaatccctctcggtttcaaccgcctcttagactccgccaagtggcaatcttcctgcatccgcaagtctggcgagtcatatacacatcaccagttgggagattaagacagatttggttaggaagccccgttggaagccgacggggagtagctagttcttgatgttgcattggcaattgcatatgatggtcgatacataatatttgtcagaaagccgatttagcagatcattaatagtcgtactagtaaacatggtaaattagatgaaattacctcggaccatgaatcctatcccctcccagtcagatacctatataaacatcataccaatcctcgaaattcgagattagagttggaaatcgtctaatacgacttcaagaaaatataccatctgatttgcttctgaagatcaaccttgaattagaatttcaacatgcgcttcacctgctttgtgttggctttgccattcctgtcaattgccgcacccatgagtggtattacctccatcctatgaattgatattttctatttcctaacgtctatgatagctggctttgaaactcgaggcttggaaggaactgaggagaatggacaccaatcctacaagagagatgttgctggcgccgaggagaacggacaccaatcctacaagagagaggtctctgcggcctaagagcacccacgcgtacgtgctggcctcatcagcgaaatatgcgtcttctttactagacggccataagtataagcgggctttatgtacttcacatatgcacacattttagctcatcctttcctcgctctgtacgagtagcacagtcaggatcatctgcgtagtagctctagatatatgttatgaagcctttatgtttaggttagaactctttgtcgatgatcttgtgccgattagctttatctagcacctttagacgcctggccagaaagatgtaaatactgcagtaggggtttctagagtaagataactgagcggtcatatgatctatagttagttagctaactagtgaagagggaaatgcacgatgggtaagtatccgggccatataggtaagataagaacaatataataatactaactaactatctaggacggttagctagtaagtatagggattatatagactatactatagtatataatctcctagtatataaatatcttataacttacttcttatttctagggtaataatctagttaggctctctctttctaaaactctacttaataactagttaggcactcacttttctctgcctaaaggataaggctactaaactagggattctgactttctctactatattagttaacaaatatacttagttaccccttaactccctttatattaccttatatagttactctaacttatatctcgtctacctaagaagcgtccctttcttatcatacctctctagctatacctttatccttacatcctatggcaggaagatgggtctccctgccttattaattgggcatctgccggctagttactatccaaggttgtttgagttctgcgtgcagtggattactgaaggaaaggacggtaaatttaattctcttctcttggggtcgatgaatcctttgtccagtccagagatggcgcaaaaagagtccattatgcgtgcttggagaaatatccagaagtatcctttgtgagcacatgagactccagttatttattgattgaaactcacctacttccatccagtcagaccaaaaaatccaaaaagtccaaatcatgccaaagagcatcaggagaacttctccctgttccccctccttcgatgccagaatacccaccagattggcatgaacaagataggcttctatcataggtattttgacgtttcctttttgaatatgccctataaaaaccgaataaatttccatgttaacctttctttctcattctcactaatcccaccctgctaatctacatctggaaagtatatgacatgagcgaggagtagtcttaaccttggtgccctctttgagcccccaaagagaggccaatatcaaaccgccgcatatttctcgtatcaaaatcgatgatagagcaagccacaaacacattcttcagatgtcaacaaaacaagcagtctacacccatgacaatatctaaacagaaaatgtcaaacacaatgtccatctacaggccaccagcagagcaaatcttcttagactcagggacacgctcctggtaccgactcgggtacgcggagccctgtaccttctggcaaagtttgccagtattcattttcttccagccactgactttcttcatgatcttgaagaactgcgcggccgactttgcagcatccatatcagcagcgatgttggggtagtaaacagcccgctgctggaagatgcccacgctgtcgtagtcctcagccacagcatcatggtgatacttgagagaagcggggaccttcttgttggcgtaaataagaatgttagacttgaggtagtgttagcaagcttctgtgttgttatatttcaattgaatgtgtatgttaagactcacctcaacaagagcggttgaaattccagcgagacagccctgacgacccaggccctctttcttggcctctgcgatgatggcctttgcgtgcttggtctgggtggccgagagaccgggcagattgctgctggtgctgcgctcgctgagggcgccttcgctcagggtgtcttcgtcatcgacagtgtcttcgctggggcattcctcggtgacatcgctggagaagtcggaaacatagcagtcgtcgacggtttggtgccagatgtcgctgccatcgacggtagtgccggtggcctggcagacgatttcaatgtcagctctctcctcgtaggtcttgactacagagtgagaggctcctggaccagagtggcagtcgatgacgctgccagtgaccgggtaggcattgacaattggcgtgagagcgacaaatgcgagtgcaagaatgggagtgaacaccattttgaatgagctttggggttatacttgagtatattgagaagttgaagctggtattgaagaatgaagactagccgatgttgcgatcttgtgagctgatggatagaggagcttgaaggggaggcaatgagcatttcatatctctgggatcctcaatttctcgagatcgtatactacatcaatcaattactttgtacattgttgcatgcttcggacccttgtttgccagattgatcccgtgctcttgccccacgaagctcgtatagaagtggaatctagagagatcttcattgtttttttcccacaaagcccgtatccctagtcgaggttgcatcaagcgagattaatgaatctatattcaggaaggccatcccgtataaaccctatagggagttcccgtgttattcaaacgtccgatgttcgaaagcttaatcacctgtcagggcacaacgtgcacgcctaaaaatagcagggcttatacgggtactagggtcgattggtgtagatcaccgtattcaaactatgcacttcaactgattcgccagtcatgttcggggcagatttagtgcgtgctacatcggagagatgcgctgaagtatctcgtttcatctatagtatagaagtaatttccgaacgcgggaagggttcgacaaatatgggtttacccttgttttgcgacaagcctttgtagtgcatattaagcatcggctattgtaacccttatttatgtggtaattgcaactcatgtaccgggtactacgtcggtcatggggaccggactgaaggaataacgagattgggctgggtgcatgctaccaaggtctcgtaatgtatttcacaagcgagtaggccttcgagacatagcaaatacgatgaattgcaacacgatcttacaacaatggttatttagaatatactcttatggaatctaatcactatcgtgggtttcgggaaattcaacaaaatagtgggatgtatatatttctaaagtccagtgatatttgcgatactatgacaatgcagttctctgaattatttgaaattgagatatgttagttaccagaaatgtttatcaataactaaataccaacagcattggctgttgacatgtctcgtggtccagctcgctttgagatacgttatgatcttgttacttcttagctcagatcggtctaaatatagtattggaggaatccaacctctgaagagtattccaaacaaagactaaacgtcagaaagtgcatgtttgcctagcttctgcaacgtgcttcaatttataaggtgtgacaagttggcttgaccttgtcgaggatcacgagtctcaatggatactgttttggataaatgagcgagtcaagtcattgtccactatccaccctggttagtacggcgtagctgaatcaaccctaaggctgtgagagttatggctcttctacccgattctattgtcaatatttccagaagagctccgatcaagcttgatatatatatcaattctgcccaagcccctttgcattgacatttattcaccaaaatgtgtgacctatcaaaatataactaattatacatgaactattgaagaatcctggcgttagtgctaaaactggatctcctcaagcgggtcagtcacaccgactggactcgaggctgagacaaagcgagaagttcaaatgagcaaaaaataagtataataagtcgagaagtatatacaatcgaagtgaagaggctctatagatgtatagataaggaattgcatcatcccgaatccccgacgtcactacggcagaaggcggagagagagaagaggcgaagctgaggcgtgtgtgtccacggctgtgaacctgtgcacttggtctccccgctctctccccagccaccgtcttatctgtcgctttccaccttttttttgcttctgccttctccttcatctcgagtaattttatcaccctcttcatctgtggaaaaaacaagatatggctcctcctccttccgccaccttgcctctggttgagagactcaaggccttggcgcagaccctacagtacgtttctccagtccaaggctgaaatgaagcttcaatgccttgtttatccatactaacgagatgtcacgttgcaggtttgcctggttcgttgggtaggtcaatctgaagcgcacaccgacaaagatccaagttcaggcccactaacaatttttagacatgtgacacttttgctctcagtcttccgctactccctgtcttgcatcttcttcaactactactcctccgcggcacagatcgcctaccgtttgaccttcatctcggccgctgtgacttatggaatcgtcgtgtacaagggccacttcgcccgaggtgtccaaggcagccctctggcaattgtgttgaagctcatctctgatgagaatgtgcaataccttggtaagtgatcagctatgcgacagcccaaacctcaagcttacacgtattctagggatggctctggtctggctgtactcgcgccagctcatcctggctcttctgcctttcagcgtctactcggtcttccacgtcgcaacctacagccgcatgtacttaatccctaccctgcagcccgctgctccggccgcccctgcctctcccacctctcctacctccaagcccgctgtcaagcagtctcccctcgccgagaccattggacggttcatcaagcagtactacgatgctagcatgggtgttgtcgcaaccctcgagatcgccctgctgttccgacttgctctgtccgctatcactttctccaagggtagctgggtcctcttggtaatctacctgtctttcttccgcgcccgctatgcgcagagctccttcgtccagcaagctgtccgccagcttactgcccgtgccgatgccactatctcccaccagagcactcctccccaggttcgccagggctgggaggccatcaagggtattgtgcgtcagggttacgagatcaccgatattggccgctacatctctggccctaccgctgctaagaagccgcagtaaatctcgatatggtatgccagacaccttgctttgcatgctggagctcatgacatcaggaaataacatgggtttttggtttgcaatgttgctgagtcaaggtggctggtgcaaataatattacagctgtatctttcccataggcatgttcccgcctgagcaaaggacaagaaggatgtcggagtgtgggacgcccaggtcccgactgtagaaaagaaggacgcggaggattcctgccatgatgatgctatacgcaatgacttgtgtttattatttctagagtattgcgatgcatagtctgtatttgctctcctcttgtcaacataccttgtttcggattcatttcattattccaatcacggagagtcgtaaagatccgaaatctagtacaaagggtgggagggcttctaggcaggagggctgcaacggaacaagcgctcaacgtccttcaggacagtttataatcgatcaatctggtctagacaaagaagatatcagagatagacagttttcccgagatatatttgcccgaatcaaagtaggttagtgcttagttatactagactcgaggggctcttactcaaccccgctgatcatcaggtttctttcataaaatggcctagcggtaactgaaactaaagaagccccaagccctgtgaaattagctggttttactagcattggacaagctctatgcataagtttattaacaatgagcatgcaattacggagatatatagttgtgtggaggatatcaaggacaatcaagaagctcatttgcggcttgtagcagttgactattttagtcctcacacatatagaaaaaaacctctccgatcaaatatacatagttgttcatgccatatgctgtttttagatcgtatctctctcgaaatatcgaatgactccaatgacagaatcccgtgattcgtgcctgaggcgaccgacttatcgggcttggcggcgaaaagaagccgatcagaattttggctggcggaacaatcatcttgcaaacaatactaatcaatcctttcccggtctcttgtcactctttcctattatccttacctcccaggggtgctcctctcccgctcaatacctcagcccctcagcacccccatatcccagtctggtcccgaccagtaccatcgggatcccaatttagcataatattgccatgagcctgacctcgcgagtgttcggcctgttctcgacagcgacttcggactcaacagcaccgcctgcgggggactcgaatacctcgacatggacacagcagacgccagtgggtggaaccgatgattcaaccttcactgctcgaaatggcgacctcgcgctgttggaggacgaggaacctcggccgccatacttacatgtacaattgcccctagcggcatcatatcattgcccaaggactgacctgatttgaaattataggcgatgttggccggtggtaccggaggaacatgtggcgacatgttgatgcactcattagacacagtcaagactcgacaacaaggcgatccgacctttccgcctaaatacacttccatgggccagtcctattcaacaatttaccgccaagaaggattctgtcgcggattatatggaggggtaacgccggccctgcttggctcgttccccggcaccgtgatcttcttcggcgtgtatgaatataccaagcgcttgatgatcgactcggggatcaactccaacatcgcatatctatcaggtggcttctttgccgacttggctgcgtcggttgtctatgtgccatccgaggtgctgaaaacccgactccagttgcagggccgatacaataacccgcacttcaactcgggctataattaccgcaatatgcaagatgggttccgtcagatcgtccgccaggaaggattttcggcattattccacggctacaaggccactatattccgcgacctcccattttcggcgcttcaattcgcattctacgagaaagagcaatctatggctaaacaatgggttggacaacgggacattgggctgggcttggaaatattgacagccgccaccgccggcggtatggctggtgtgatcacttgtccgatggatgtggtcaagacacgcatccaaacccagcaaaaccccttagagccccccgccggttcttcgggcgccaaacacactgttgaaaacgtaccgaaagaaagcccacggccgcacacgtcgacaccatcacattcccacccttcgcgggcacactcgcgaccaatctccacatcaggggcaaacacaacaatcccaccgccgggtacaccccgacttgacacttcctccgtgttcacagggttgaagatgatctatcgaacggaaggtattgccggatggttccgcggcgtgggcccacgcggtgtatggactagcatccaaagcgggactatgctggttatgtatcagtacctgctcaaacagctcgaggctcaccagattctagaagagtcttaggaccttacatctaactgcatgcatttccaaggttgctgttctttttacattttttttgtcattgggaactggaggcgttggattctttgtcccgatctgggatgttatgaccctgctttcagcactttgtatattgtgtaccctactctgtgatagattattagactggctgcggcctcctgtaccatatctctttttccaactccatattacatatattgacatatctatactccgggttctatatctgtttagactagtatctaaggaagaagggcaagccatgtaataactagatatcaacaggaaatgcttggacccttctatcatacaaccttggttatatattctcaaaatacatataaaaaagaaagcaaaaagcccagcggaatgacactgaacaaagggagtgaacgcgctagaccgtgttttgttttggcgatcggcggatgtaaacaattaccggccactccccctccttgcatcttctctccccccagcatttactttcttatttgatattggtccaatttctacagtgatatcggatacattatgtctcttccttatctcaagtcgttgaaaaagcctgagttggccgagttggccgatcagaccgaactcccaaagtaagaatgaatgcgattgccgcatagactgagctgatcaaatctatagctacaatgactataacaagaatgatcttgtcgtagttctggacagacacctccgtgaaaaccgctcaatcttctccgggctcaagagtctctctgaatactacttacgcctggcctctccaccccgcagaggaggatcgcccgtgaagcgcgaatccgcgcgaaccccggcacgaaccccggcacgccgctctactaagaaggaagtgagggaagaggaaacggatgaaaataagtaagagcggcctcaacgcgccattcgatacatcgtcatcacgcatatattaacccacgcagtagcgaggatgcggaagaacccgagcccagcccaactgtaatcagcccgacaccagctgtggggcgcacgagcgcacgccagtctgcgcgccaaacaccccaacagacaccccgtcaaccagcagttctctctaccgtcgtggactcagagccatcgctgcccgcatctccagctgccatcaccgaagctatcgacgcacagacgctcaagttgcgcgagagaattgaggatgcatggactgcatcgggcttagtagagcgggcgcattctctgcgagcaacgctgagcagcgggaaggcggttgagatcatcgtgctgctgcttgaaagcggcagtcttgcgaaagagttgatcccgatacgcttccttaccactacaccggttgtgcaagccgtacagatcccggcgattcggatccgggttcctgatttatttgtgctgctggaaggaacgttctgggggccgttttcgctgtggttccttacttgtctgcttttgcctttgatttctgcctactttatcaacttgagctggaatgcttctagcagtacgcgccgcacccagtctgcgcctaatctcgcccagtttgatccgttgacgttcaacatcgtcaaagccttgctcgtgcacattgtgtttggcaaaggtttcaacttctttggtttctatagtcggtatgctattgggaaggtaattgactccgtccctggtggagaccttggtatcttgactggatccgctatcggtggtgtgactgctctgtacgaagctattctgcaccgcccataagcgacaggacatgacttttgtgaggctgtacaggttatctggcgaatggttcttcagtggttggacgtgttttatctcatctgtctccaccgttgttttttcttcgtttatgggttatgcgatatgcgatattgggtttcttttttgccttctctttatctttcttggtctcccgttatagccagagcaggcgccttgggagttcttattctggttcttgttctgatcatctctttgggagattcttccctgcttgccctaatgaccgattcattattttccagtctgtgataaaaatatccgagagtagtagtatatttatagtcaagtttacgcatgctgcggacggcttttgatgttggctcaggcctttgttctgtagataggcggaatgtcgtcaaacctcgcggacgtcgacgacagggttcttgacggtgcttggagtcaagcggttcatgaagagatcgaagcagaagcccacgggcgggtttttatattgatcaaaacgcgcatgggacacgcagcggttggtggaagcaaatttcacatatatgctgctatgggtgggggctgaatcccaaattcgcaatagcgttatgtgattctaacagcctaggcttcgtgaagcgttaggccccggacagactgtcgtggtggttcctattaacctccgtacccaatgtcatgcttcacgctcacggtcacctcttcaacctctccgccaattccactgtaaacaaaaccgggacagaggtctcaacctccaccttgtcggcgcgaatatgattgctcgtggatatctgccctccaatctcggtatgccaattctccacatcccactcaaagccatgggttgtgatctcggcaggtgacgagagggggatgatcccgatattctcttcgaagaagtatactggttctggttctggttgtcgcacttgctcctgctcctgctcctgctcttgctcttgctcgcgcttccgttttctcggtgacttgcttacattagaccccaacgctgtcgcgatatctgctcgtcttgttgcaggtgtgtaaattgtattcttccctgtttggataatgaacgtaatgctttcctcggagacgagatacaggttaccacctgcagctggcttggcatcagaggtgtcggcttcattttcacgaatcgagcgttgcttctgcgtcatcatgtacaagtggtgcacttgagagaaagcctgatccacacgaccacccagaccgccgaggatcacaacttccagaggtgattgatcagatggtgaggttgctgtgctttgatttgcgccattggtcttcgatttggtccgagtgtttgctctttttcggggggaagccatgatatctgcagcatgtacgttgagatatttcagacatttcgtgaagtctgttgagtattggtctggatcttggaggatgggcactccgagcttctcataatgtcttcgaactgcggggcggatagaatcaaggtcgccgacaatggagtcaggaagctatatctctggtcagctcgatctttttgtgctgcagtttagaataaagttgcagtccagagagattatgcaattaatgtctatatatatcgcttactgctttagatccctttccattaacttctggcatatcaaaaagccgattggcacctccatcggcgcaaataatataggatgctgcattggcattagcatcttttatccaggaaactgcatctatgcacaattcatatagaatcttaccatatctgctcaacactccaaaagcattctcattgattggctggttaaggatgagaagagcgtaaggcgaaggactcccctcaggacggaagaaccggctgggatcccattccattgcaagagttgaatacaaaccaaattgaagtccaaaagacgtaaacaaaccaagagaaatcaaggccgaaagggttggtggtgacgatataattatcttgaccaagctgcaacgtgactggctgacgcgggcacgcaacctcaggccaaaatccacatcgctttccaacttctccatcccgcggtgtttcgactctcttcctctcaatcccttcttggtggaactctcggtcaattcgattgattcgcactcctctcacacataatgttccgccccgccgctcgagcgctcgctcgcgcgcccgctgtcgcagcccgtacaccagcgaacagacgattgataagcaccggtccgagcaagtcgagaagctggaagaataccttcttgcgattaggcttggccggtggtgctatctactactacaacacgagcagtactttctccgaggagccgaagtgtacgtgtcgccgattggagttgggtgttgcccttgttcctcggtccccggggttgcaagccgcgacaatcccgtccccgtcaaggttctgagttctggaatcacaaatcgctaactctgcttccatttggctttagtctctatcctttcttcaatccggaaacaaaatgttgatgatgccaacccccagactctcgactccattactcccaggattcggcaagaacgagctgccgcgcaggcccaaaagaacgagtctgctgctttggaaggtggactgaatgcccaggagctccaggaggaggctggccaggaggctgcgttcaacccggagaccggcgagatcaactgggactgcccgtgtcttggaggcatggcccacgggccatgcggagaggacttcaaggctgcgttcagctgcttcgtctactccgaggaagagccaaagggtatcgactgcgttgagaaattcaagtatgttttactgtcgttttgagggcagtggtcctgtgctaacaatttttgcaggggaatgcaagactgcttccggcaacaccccgaaatctacggcgccgagctggaagacgacgatgagccccaaccccagtccgatgctcccccctccgaagctcccgctacccccgaagctccatccactgccgccgagctagatgcgtcgtcgcaccccactgagaagcagacccgcgccaaggatgtcaacacccaggtgaagaccgagaccgttgctgcaggcgataacgtcgagggcgacaccctcgttcccaaggccgagcttgacgtcgaggagaaggagcaggctcgcaaggcttagaaccgacctgcatcctgtttgacgccaccctccctagagacaagcctactgcttgatctctcttctgtaatgcatatcagggactgggattggacttgtgtattatatagacctttctgccatctctccatctcccgtactgccttcgatgcattttcccctcctgatctttcagcatatccattcccccgatctgcgctcctctgtgttcttcccgatacttcctctctgtcaatgtgtaacttagtgtactgatatgctttacgctcttgtcctttggacaaataaaagaaagaggggaaatctactagactttttgcatcatgactggtatccagtatggagcttttgtataagcgctagacaaggtgggtattttccgtggaaacttgttgaatatagatatcagtccctgcaaaccccagcttctcttgggagaatttccataacggaatattcctgttgcgagaaacgggagcgattgtcgcccccccccccccccggcaatcnnnnnnnnnnnnnnnnnnnnnnnnnnnnnnnnnnnnnnnnnnnnnnnnnnnnnnnnnnnnnnnnnnnnnnnnnnnnnnnnnnnnnnnnnnnnnnnnnnnnnnnnnnnnnnnnnnnnnnnnnnnnnnnnnnnnnnnnnnnnnnnnnnnnnnnnnnnnnnnnnnnnnnnnnnnnnnnnnnnnnnnnnnnnnnnnnnnttttcccccccccccccccccggtgtctctttcaaaagcaaaaaaaaaatgcatgatgctccgcgctaatagctgaagacttaggggaattaagggaaagagaaatcgatatcatagagagtagcattcccaatgaacgacgtcctctccgaccatctctgtccatattaaatatttagtaccacctgagaagtataaaaatgtagttgattgtttgatcttcctcttcttactattgggcttattaggccaactcgcattcgatcaagctctcgacactgtccagcggcgtccagattttagcaattctgagcccaaccggctcaataatttgtgccactgctgttcagtccgctccttagcagcaagatccaccatcattattaggtccagagaagtagcctgccagtgggccccagtattgggaacaacgttctcattgatcagcaacttgctgtatccgggtgtcatggcggcgaccaattgtgacaagattttctggcatatctcgtcgttccagtcgtgcaggacggagtgcaagaaatatactcgcgcgcctttggatatgtcagctactagctaacgctctatgtgtgtcaatccactcacccttgatgggctgttcttggtagaagtcgtgggccatgggcttaattgccgggttcagcgacttgatatcattcaaaacatgcggttggtcttgcaggatcaatctgcccggtgtgtttggccacttcgatacgaactcgtctagatcgtgccctttgtttcccccaacgtccacaatgaatacgtcttcctcgccggtctttgctccctcaatgagagtttgtactgggtagaaatttccatccatccagctaggtctaccttggtggtaggccgacatgagattgttgaactgagcgccgagttcaggatagtcggggttcttgccgttgaggaattcgaagaagggatactcggttttgaaccctagagtaaacggacagtctgtaccattggtgggacttcgataattgtttttcttgagccaggtgggcagcacattgattgctggaagggtgcatccattactgccagcggaaatcaaatcagtacaccaatatggacgggagaacgcctagaggtggaactacttacatgcacggccaagcatcattgtaccgcttaatagccaacgtggtagttagcccgttgcggccatactcatccataccagtttcgacaaagacacccattgtggcgagatgcttcatgatacgacctttgaaattataagcgtcataattatttgacttggaagttatcactgaccgagaagttcgggttccgcacctgttattgctgcgagctctgctaccgttttaggcttgtcagtctgcgctaatatgcagaagatccccagatcgatgcaggtttcaatgccggcaaacgctgtgggctattacgcataaacaatcgaataagcatccttggttcctgaactaagatctccgttctgacgtacctgggcccagcagtatcgtagcatggtttcctgtggcgtttccattgcctgtacgagagaccgggctgtctctagcagcttcaggcgcgcatcggcgttgccctttctgtaagcctgggaatgagattcaatttccttttgcaaatgcaccagtttctcgggagcgctgggtgtagtggcaacttggggatgaatagcaggtctgtttgataaaccgatgactgtcattttgaacgttgtccgtgaacttggaacaaacaccttgcaccgagagcaaatggcaacattagaacggaagtatgaactatccccagcatctggctagatgaggggaattgctgtctaagagcgatcatttgtgacaaaagtcccgatagctaggtatctcatacttagataaaaatgagtcaacctgctgtgggccaatgctataagaggttatcgcattgttattgtttattgtattcttcatttattcggcctgaaaaataatggagccagtccaactaaaccacttatagatgagtggacagggattatcccgtgtctactatttagtgtatgcgggtctacgatataggacgaaaacttgttcaatagactgggatccgcacactaaacccacttgcagttactggatggaggcttcgcaggaccatgatgcatgtcgctaatgcattttgccccgtaatttacgccagagcaggccaattgaatcttgtcaagattctactatagtcaccctcggtttcaatgctgatgcagatagggcaacaaaggcccaagtggccaactattcttgtacctatatcaaaagtgagggtgaatgaccgaatttcttgtcggaggtgatttggctctccaattggaccacgggagctataccactcccttctatcagtgagtcgtccgtgtctactgtccacttaaagttgggtagaaatattgacgggccttgtaatacataacaaatatcattattcttgtttaggacggcgagatggcacgtaagttgcgtcgcgccgaaactgagaacgtcgagctagtcactgggaaccaaggcgagatggttccagacaatatacgcaagaagattgactatctagcgtcaaatggccacatcttatccgcgctttccactatcatgtcttcaccgcgagactcagcgtctttagcagtctgtatccattcatcatacgctgcgcgatgaacagccctcgcagcatcctatgcatcgttcaggatccatccgtgagaatctgtatcaagtgtgttttttagccataattttagttcttaaacggactcaaaatcttcgtagtctcgagcatgctgctttaattccgcttctacgggagaatacggatatgagccttctaggcccagttttttccagctagtaaaaagttcaatcaattcttggcggacagcagcagcggagtcgctctatattatttggctgtagtgaaagagtcggaaaggagttgggtcaagtaatcttacagggcggagtttaggagtaaggcctgttatgattgtattatatatctggtagtagatggaattatctcttagttctctttcctactgcttagaaagtttagggtcatcttgatcgttctcggatgaatctttattaggaataactggaagtatagcaaaatcgggtatcttattggtatagataaacgcgggctcgacgcttattgattgctaatctattaggctattaataatagttggttcgttggctgagacgaagatattcctcttatagaagtctgggtagagaagagctcgttttcccctagattccggttctagaagaccggtctgcaatatggccctataaagaagacctgttcgaagggaaccttagatttagagtctagaggtatatctgcgaagtatagactcctataagctaggaagtccagagaagctatctttcttaatgttaatgaaagcgctttagtatacagtatatactgttctgtattcattataggctatacttggtatagttatatacccgctatatgctcctagatgatatattcagtcccagtcggattagaaggattatcgttctagtcgagaattttcgggataggaagtgagatcttagactatactataagagatataatgcagtaagtatatcagctatatcctggtatactaataagccttacaataagttattattacaacttcggagttagttgttagccctagcggactagtaatactcgtgggtatccttactataatgcaaggtccattgtccattattaaaagaaaaactcgactgaatccaccttcgcgcttcttatatttgataattttagttgctcctaggcatatgcgaatggcccgctcacatagcgctgagaagtcaaacgcaatatagcgcgagtctcactcgaggttatcccgattgagccatcttctaccagtgtacgaatgcggatcatcgcctttcaaagtccctaaacaattgcagggaattcaggttactactaacgaagagtcggctgttgcgaatctgttcctggggatgagctgcggggcctgggatggggcacaggggcgttggttttgtttcctatgtcagataatggtcgaatggagtaatggaggcaatgccgagtgattgacgagggaaaaccgaaccgtcgccagactcggagcatattggctagctggtctttcttttcttgggttcaaggttggatgctattcaaatctacaccgcctggcacgcgcctgtatgacgcgatcttaaagccgatgctataacgtcgctgtgacacgttgtcttgttattctcaaccctggatgagtatgatcggatatagaaaaactaaaggcaagttccatttggataaccttgagaaatcaattgccgctggtcatatcttagcatcatccgccacaagaattcggatacatttcacaaaccacttttagatctgatctcctttcgtgctcagagcgagaacctctgtacaaagcttattcaaagctcgtatgaatttatggaggctggaagattgtcccccactcgattggggcacatggagaggcacgagttttcattgcggtatactccatacttgagtggtcgtcctcgcagatctagatcttcaagagcctaggctcccaaaacaaggaacccaaagccagctctaacaattcattttcagtaagtgtcccacacagggactttaggaccaaatagaccgaaggatcttgaatttgcacactccaattacctacgcatatctctcctcagtccgacctcgggagatcctcggggcggttacaatgagtcaccgtctagtagacggcgtctacggtaccgcgacttatccaccgcgcatctacgggccgccagcctcggtcctcggcatagtaccaaagggccacgagtggatcattgagcaaatcccttcggtggatggcgagaataaaagtaaaacggttcaattatatcattgctctattttaagagtgaaacagcaaaaaaggagttgaacgcgcgcgaacggagtacgatcgttcggggcatattgaagcccatcgatactcagtatctgattttctcatgattacagcaagtgtggccaaaccgaggcggctggcggcgccacccattgtccggtttgagacgggataatcactcgttcgactaataactgtacacgttgaagaatatcattgggtaattgtaagattttgaccgctcaactggcaaaactgagaactcgtcgggtcataaagaatcacgagaacaggccaagagacactgaagaggtatggactcccaaaacgccgaagattgacaagaacgaatataacaaaacaagtttgtaattactcgcaccaaagtcagcatcgtaatttcagcatatcattgatgatgggatcatgttgaccagacaatgtcacaatggcactctcgccacattacaaatatcggtagagtgacagtgaggactctccaccttggaaattttccgtcacttatacaaacggaattaattcacaccttttaagaactcccctgttcatgcttaagggtatactccgtcgtgacccgaatagccatggggtcatgctgtccatcactaactcccaggccctgatttccctcaagaatatactcctcactttccgccccggaagcgcgtctcgccttatttgcattcaggacactgtccagctcaaacccgccactcttccgagaccgcgacgaaacaaacgtcttcgtcttcccggaagttccattgcacgcatcactgttgtagtagtggctcttagagttcttgcggttcgtcgagcccagccagcgcgtgttgcggaagagcggtttgatgccgggtagggagacgacgatggctgcgacgaagcattcgcggtctgcccagccaagtgctgtgccgaggtttgtgatcgatgaaagtgagtagtaggcgcgtagaatcgtgcagatcataatgaagactcccgaggagaacatcacaaccaggattattttgcgttcgattgggatttgaagtttggcgaggattgggattgggatgaggagtatgcaggtgtcggatctgtttatcatagtgttagtatggggttctgggctctggggccttttggaggtgacttgcactacgttgaagacggcgatgacaatgtaaagaggtccgcggagagtgcagttgtctgtttcggttagttggctgtcgggtgaataactatcgagacttgcctcctgcgtagggtttgatttgccaatttcgctcaactggcctgcagatacagacatgcgtcaagaggcaaatcaaccaggtaatcaggcaaaatgctgcagttgctgtaactaggtgacggtgccaggttccgtgtctgtgaagtcttagatatgctcaatagaccgttgatgggtgacaagttgacatacgtgagtttccagtaaagacatagaagaacaccctttagacaccaaatatagcagatgtaccatatccagttcatgaaagccagcttcgatccgaggatcatatcagatattttgctgtctgggacaagcatagctgtttgctcgtctagtccgatgttgtttccatacacccctatctcaacgttagctgtgttgtaaggggtaattatcgttggtatttacccagcagatagatgatagcagtcatcgtggtccaaaatagctgccatgacactgttaaaacaaacctagtgaagcttggggaaactgaacataccatgccagcaacagcaaaagcatcatccagctggagcccgcgaaggcctcctatatttagtcgggcaaatagccggactaagaggaagagcatgccaattccatattcagtgaaagtctcgactgtcaaggcatcggcggacatggtgaaaattcaaaacaatgacaatgtccgttcgtgacaaaagcaatcttggatgccttgacaataagatataacactatggagaaaggatctcccgatattaatttcaattgatcagaaacggtgcgatcagactggatctatcacctccagcttcttactacaacataagcctcgctaggtatcttcgctccgatctacttcaagatcaggccaaaggtctatgaaacacatccgttgtaggatcagtctctctgctgttcagttcaccaaactcgagggatttgtcgctagcataaggtatcgtcggcaagtgatagataatctcgctgcttataatcactctgatgtcgcggtgattagggacactactactctgtacaacatgccgatattttccgcaatcgtgtggcacattcctaaaaaagatttgacagggatttgtgcaaggattttagcaaggattttagatttttctgacagtaatacccttgtctaagtctaagatggcaccaaatttactgcaggtgtaatgggacgggaactacggagtacggagtattgccccgcgacaaaggactgagttgtggattcaaggacttcgattgtcccgatttcaagaatagagatccaaaggatagccgtgcatctggggcatatctgatttactccaagtcaagtattgaacagcttatacctcatctctcaaatatgaagaatccaacgaggggagctgtcaaaaaaccgaatgttacctgacaaataatagggctgatcttttcaggagcccggacattgcccggactgactccgtgagagattattagctcaagaaataattagagctgtggagattgatggcaaagacaatcacaacccggtacggattcattgctacacagccatccgaagaacctacgaatgatataagagttctcccaagtagcttgatttgaaactcatggaaatcaagaaatctctgggaaatgaccaaagtcgcattaatcacaggaggaggtgtgatgagcccccgcataaaactcacgaatgcaaaaagaggctaaacttaactaaatacacagccagtggaatgggcctggccgtggccaacgctctatccctacgcgaagactgggaaatccacatcctcgacatcaactcggagcgaggagcccatacagcaaaagaactaccccggacaatattccatcacgccaatgtgaccaaatacagcgaccttgcagccgcgtttcaggacatgttccagcggcatagcaagctggactttgtattcgcaaacgcaggtgtcattgaacgcaccaacttctactccacgtcacaagcagagaacagcagggatgtgtgtccaccgccggagccggacctgctctcgatcgacgctgatttgaagggtgtcatcttcacggcttacctggcccagcattatttccatcactcgtctcacagaggccgagactcgagcttggttatgactgctagctgtggtgggttgtatccgtctttctattcgccgctgtactctgcggccaaatgtgagttctccacctaatttgtacagtatccatgtactccgtatccccgcgtactattgtaccgtcatatgatatcgatgtgatctgttggctgcgatctcatatcatctacaatgttatttcttattctgctgaaacgaccgaaactaacacaatacagtcggcgtagtaggattcatgcgatcgatatcgcgacacttccacgcaagcggaatccgcgtcaacgccatctgcccaggaatcgtacgcactaatctagtcgactcgacgggctgggacagttttccgcctggtcggttcatcgatgtggaaacgatcgcccggctagtgctccagctcgtggatggtggtgaacccgcgggccggggactgactgatacacccggcaggcatctgcccctggaggagttgtacggagttgcagtggagatctcggatagcgggttttatttccgggatcagcatgtcttttgtgatgatggtatgcgtgaggtgatggaggcgacggtggtcgaaaaccaagtgggtgctgttctcaattgttagatggcggaactggttccgtatggagatataatatatcatgtcgtatgttgcaagatcatcggtaccacttaggcaaaattggttagccttgtaagttgttattggtgctggtgtttagatctctgcgataattacataattatccccgttacgatgttggagtcttcgggcttgtctgtcatctttcttttgagcttcctattttggagattcattatgacagaacaaaataggccaagtttcaatgaaatacagtcagaaaaggggaaattctacagaaatggcccccaacgagaaacacgaacagaaaaatacacgggaaatactccacttatacttgcaggggtttaagcgagtcatcgatttggaacctcctttgcggatttatttctcgatcacatggaccaatcaagtagtgaacgcgagattgaactcgatcgactctcgtccagtttatgttttctaaccataaatggcatggacgggccgtccgggacgagcgccacttccttgaagggtcacttttacaggggccaagtcacgagcagagcgttgaagcgggaaaaaacacgggccagtaccgatgagagtggatttcgatttctcagggcaagagcggcagcaccatttacgagctctcactcagatattacatgtgatagatcacattttccgccgttggagacccacgcggaagagaagacccctgttgccgcggacaagacgaatgcgacaatacggagtcgaacaaagctattattggctcgcttgggctttgagcttgggggtgaagatcgtcgcagaccgtgctagtggtggagcctatctgtacttttttatgacgcttggcccgttagggcagtagtactccgtgggtcgggctagaatagatgaaatgcactgtattatttcctacaggtaactcttccgatatgctcacggaatagcatccggaagcccagagtcttccccgtgcatgatacgaaacagtggctcccagaccgtgacagcccgcttggtgatatggccatttccaggttcaggcatctggtagtagatcagcttgtcggctgaacactctaacagctgacccgacaggccggtcgagtcttctaggaaggtttcgtagcctttgagaatggtctgcacagaggtgagactaatttcaaagtgatgtcagtgttctgcaatgttcaagagcaacacaaaatcttaccattcaggcgtgacagcggcaatcatctcgggtggcacaataggcgtgctcacaatccccggcatgacacaattgatgaaaatattctccttttgcttcagcaatggggcaacaccccgtataaagtggtttaccgcagccttggagccacaatataccggatacgactcgtggggaaagatcgcgccaatactacccgtgacaacaatacgaccaccaggctgcgggttatggcgcatgaaatggattgccagctgggtcccatacacaacgcctttgtagttgatatccacgacagacaggtccggtgccggcgggatgttgtcgatgctgttggtcttcgcgtcgtagatgtagatagaagatgtatcgacaataccggcattggcacataaagcatcaatacgcccccagaggtgatacactttgctgaatacactcgcgtattcttcgtagttggagacatcagcggcgaagaaatgcgctctgtcttgcggtaggtcttttaggagggcttcaccggcctcctggcgccgacctacacaagcaaccttccatccttttgtgcagaggtccttggcgagatcaactcccattccagactgtacggatctttgtcagtgactgatagcgggtcctgtgtagttggtttcgtactgacagtggcccctgcgacaatagcaacccgtgtttcaatatgtgaacccatcatacgagctgagatgcgataacgtttgagagttaatgaggaaagaataacttttatcgaggataaaagaaacgaaagtctaccggatcatagtgtacgacttaatgctcgggggtttttcctcatactgtagtggatcctaagccgttgggaagcccctctcctcttcatataactaaagtatggttgaagttaattgttaaaattgtttatatttcctttccccccttttccacccattgcattattgtattgcagcatggctgtggactcagaaaagggttcggtgcaggctggttctccaacggagacaccaagctcaccttcgatttccaatgaaataactgagccagttgtcactttaaagacatggattgtctcttcggtatgcatatgacaagtctactatggtgtgcatgctaatcgcgcatagattctttcttgcggttatggcctttctttctggcctattcccgttgttgcggcaattggcagcatggtctctgctgacatgggtgatccgactggatatatctggtttatcccagtgtgtaaagatgattcaaacgatccaatggaaagtactaatccaattacaggcttggactatctcgatcacctgcgctttcttgatcttgtatgtttataagatatatcttcaaagtccaaaactaattagatttcacagtggcccgaatactgatcttttaggtcggcgttggttcttggtgttgggcaatctggtaattcgatcattgcaaccaaatacatggcgcgtctaaacattcctttaggtatgcttcgtcggtcatattgtggtagcatcagcaaagaacaccaaccaaatcattgccgggctcgttatatctggtttcggcggtgcaaactgtcaggtatgagcccgattatacccatctctcctcaagtggaccagctaaaagatcattcatcatatagatggctgcattcgcgctgccagaactcctccccaataaatggcgacacatcggagtcgtgatcgccgatttcacagtctatatagccgtcattgtcgcaccagtaacagcccgctacggctacgagcttggaacctgggcctggaacttctggggcgtggccatcttccaaggtctatcattcctcggcctgttattcctctaccacccgcccaagcacccgtaagcaagcttccaagcctaaatccagtgaaaccaaccaaactaaccacacacccagcctcggcatcccgtacaaagaagccttcaaatccctcgactacctaggcgccttcctcttcatcggcggcgcagtccccttcctaatgggcattgtctgggccggcgtgtacgactcaaacgacgtccacgtcgttgcccccctcgtcgtcggcgcggctgtgctcatctgcttcgcgctgtgggaatcctttggcaagctgaaatacccgctgacgcccacctatatcttcgctagctcgtggggccgcgacttcactgcgcctgtcattgcgctcggcgtcgtcaatatgttctactactcgtctagcatcctgtggccgcagatgatcacagtgttctacacgaatggcggcgcggactggaagtactctgtcattctgtcgttgccgcagggattcgctattttcttcggtgctatccttctcacctgctttggtagtaagctgcggcattggcactggcagcttaccgggtcggtgtttgttatggttgtttttggctcgttgcttggtattgttacgccgactaataaggggactatgattgctttcatcttcctctctcaggctgggtttgggtgggctctttatttgagtattgcgattacgcagatgggtgttgagcataagaatctcggtgttagtggtggtatatcggggtgcattcgctttgctgctggagctggtacgttttgactttattactctgtcgtgttggatcatgctaatcctcgcctttagttgcgacctcaatctaccaaacagtctacagtaacactctggcgaaatatacggctatatatgtcccttccgctgcgatctccgcaggactgccggagtcgaaggtcgcagacttattggctgtggtatctcaaggtgccgcggcaatgaaatcatatagtcctgccgtggtgacagcagcagaggcggctcttagtcaggcctactgtaaagcgatgttgtaagcacacatactcacatatctcttacccgcactcttcgcaggaaacagtaggaaagaattgtttctaatggtttcttccagtgttgtggctatggtatcgatggcgtttggcatcctgggtcttgctgcttgtctatgctgcaaggatgtcgattcaaagatgaccaacaaagtgagtgacgtcattttctactcggggatatatcaccgagaaactaatgggcttcttttctttagatcgaggtgtatcttgagaacacagatctttcggagcgaaacaagtatcattagattcaactgtttgagcgctaatatgctagtgaaataatgtgccgtctagcaaaacaactcagcatagcttttgagacaaatgcattcagcccaccatattaaggagaggtcagagggcaatttaacaccattacttgataaaagcaatcccttcgtttttttatcttcgttcaaagagatccagttacattgattgctgctagacaaaagactagagatcatggctaaaagatacacctacggcataaaattgatatttgtgtcatccagtctgattcattctctacttctcggagccatttgaacaccatcatccctagatcgaatagtgtacgatcttcacaagagggcagcaaagtggtgatgtctttcgccaggcaattgatgattggcgaccatatcgggatttgggtttctgtatgcgggtaacatcgagccctcgacccagtccaggaaccccaatcaggatgggaaaacgattaaagaaggatcacgggcagcaagaggagtgcatccatttcgatggcattcgcgacggggtagattccattagcaagaacggattcctggtcatactcatacggcattgcctactcgcgttgtgtgcgacgtcaaccagaaataagctcattgggttgaaccaagagcttttcacactgggtagtgcagagacgaaagaatagatccacggtgggacggccgccttccatgggggaaaggcgctggctgttgtgtcaagtgaagatatggaatatggacctcagtccagatagtggcagcattcattaccagttgacgtcgctgagctggagcttgcgggaacggaaggcggaccggttcgcgccggccttgtccatccgctggctggcgggggtgcgcttttcttgggttgctgctttggtatgtctcagttggggcttattcgggttaactaggggatactgctcactctcggtgggttcgggttcggtcgacgcctcgtaattcaggaccaggttcttgatgcgctgctgttcttcccgatcggcttgttgctggctccgcatggcaatagcaaaggtcgagtccgacgggagatcaatggtgcgggtctagatatgattagcaatcggcataatattgcgaacgcggatggaaaatactacctgttgcttgtttcctttctttgtcatcagggaaaaggccattgtcttaggcgcaactggttctgccggtactggctcagggctagactcgctgggcatgttttcccggggacgtttcatgggaagagggatatcaaagacagtcttgcgttcaaaccgtctcgagtccatgctttcggccatcattttttcgaattctcgatcaaattcagcctcggttactgggtcgcgctcctcttcctgtctggtgacaacgatttgttcgtcctcggactcgctatcgctgtcgtcattggcctccgggttgggtccagacaccttcaacgggttaaacgggttaatgggtcgtacttcatgtagatgagatgggggacctacttcggcctcatcgctggattcctggtcctcgtctatttcgggaatagcatcctcctcaagatcctcgtcagaagagctgctctctgcgtcttcttcgtcggcttcgacgggtctctcggaatcctgtacgttgtagtttaaggcaacagcttcgctgaaaatccgggtcgcttcttcaccctcggtagcaagcttccactgcgggcgaatagagtggtatgtatcctggacaaggaagtcgacatccatgggcaacggatccttggtaaataagtagtattgcaagaaggcaaggaagaaatccaatttcttcttggcagagccacggtcaaagcagtggccacacgtgtcaagaagggtgcatgccaggcgcaagcggaagtagtcgtctggcaagtctagcatactgatctttccacgggccggagtcccaccctcatggccaaaggtgataatgcggtacagggtatcgaatatcaccggggaatcaatcatcttgtagttgtagagctcacctagatatttgatttctgcaatacgcttctggttaaatttgaagtcattctgctcgaggccaagcgtgacctgctccaggacattgtcgacgattccgatcacgaaatcctggtggtaccggtacaaagcactgacaagaattgccagaaggtgaatgctgccatatttcactttcaccggtttgctgaacacacgttctaggatctcaacgacctcttgctcctcccagtgaagtttgcggatggatttcaagatcttggtgtaattccgcttgttcatatccaggtagattagtcggcgtatgtactgctccatgggggtacgttccttctgctggatcgctgggcgcggtgggggatcaacatagtagatggcattttcgataaccatccgctcctgctgggccagatgttgcacggtcttcttgcgactcaaggtctcgaggaaagaagccatccggggtgacgattcgggattgcgcaggagataacggccgcaattctccagcaaatggccgatgatttcaatgttcatgcgcgaaaattcgtcaagcgaaaccttgaaacaatggaagataatatgctccggaacgacaccgaacttggtcagttcagctaggtagcgaacattgctcatgcgtacttgaccgaggaattccttggactttcgccgctgcagacttcgaaattcttcatcgaggtacgtggtcagtccctgtggaatatctggcaggtattgtccaagcgttgctaccaggcgagaatacagtggcaaaagatcgatgcgacccttggggatgtccgacatagctttgataagcctgtttcgtgatgctttggagttgacccagcagaaatccagggcaaactggtcgacttgatctttggtttgcaattcggggagcttggcaagaagggagtccacctgagcacccacagtcttgctggcaatggcagttgactggtcatcagcctccgcagcggccttctcgtccgaaggctctccagagtcggcggtttcaccatctggcttctttttaccagactcctcgccttcactcttcttctttttgccatcctcgagtaaaaccgcaggtaccttgcccttcagatcgaccagattctcatagaaacgtctttcctcctcgtcttcccaaatcccagcgccttcaccttggcctcgtaagtaatcagtagtcttcacaaggccaataccaccactggcagaagcatcggtgggttccttctcggctagatcaggcatgtcggttcccaaagcctcacagagcacctgcgtattggccacgagcttttccaggaccttggactgcttctcgaaattggcctggcggtcctcgaagatctcaccactcttcacgtacgcttcggcattacggcggttttgctgtgccagcgctctctggtctcgaaccacgtgagccttcacatcctcaaggtaccggttcaagatatttctgaaccgctgctggattttttctggagtcaggggcaaatcggtctccgaggacccattggtctccgtagtctgcgcctctgcgccagagattgtagtagcgccatccgcctcaacagttttcctgccatcttcagcaagcttcgagccgacgatatcccagctaaagctcttcacaaacaagacagcaaggggcaggtttgtatgatcacggtcatgaccgagcaattccttcagaacctccaatgggaacgggtcagcctgtttgtcctggtccttcgcgcccgcggcgggggtcttggccttcagcggcgtatcggacggtttgttcccaatcccaactgctccctccttgcccttcgcacccagttcctcaggtcgctcgacgtcatcgagagtcttcagcacattgaccagccaaagctccgtaaccacgcggagaagaacgcggtgtcgagacaggcggtctttctcttcgcgttcacgaatctcctggctgagcgctttgagctgcgctttatccggtgtactcagtccgcggccgagcagccagccgatctgtcgtgtgaattcccaaggcccaaaacgctggtgaagcgcgctcacaacctcgactccagcggcaatttcaccgggggatttgagcttgcagagtccttcgtagcaggcggaaatgatctcggaaaggtatttgtggagcgagagggaacggatgtcggcgaggaaagtagaaagggcggaggcactgatgccggtgcgtagacgtttgatgaatgcggtgttcttcttgagcgcggagtcaagggacttgctagtggggaatacatctagttgcaagtggttagcatcatctcgaaggtgggctgcaatggcatttcgtcataaagggagtcagatgggattttaccagattcgcctgcccaggctcgctcgttcaggtcgcgaagctcccctgcaataagaacgcgacatgtcagtcaatatctccaaggtgaggtgtggtagcccgtacttttacgttggcgatccatggctacaagctcaatcgtggggtcctttctgaatgtccgagaggaaagcgcataagtgacgtgaatgccacattggggtaaaaggagataataagagaacagcaccaagctcaaagctttgaagtgaagcgaagccggtcgaaggtctaaaagtccaaaggtctaaaggcggagagcggaggtgaaggcggacttttatttgcttatccaccacttgtgcgataacttcttgtacctacttcacctagttactttcatctcttaacccctttctcgtttctcgtgtgtgttctttgaattcaaatttcaagtttgagtccgagttcgagttcaatttcaatttcgccttcaacgccttttgtgattcgcaatttacaagtctatcaattcattgtcccaaaccccccacttcgccaggtcccaccatgagttataatgcatcaaaaggacgatcatcgcagcactaaatgctgtttcgggctattttgatccccactatgcgcctctgtgaacccggtttcccttcccttttgcggcccttgcaatcgtttctgcagctggtgtttgcggtcctcgttgctccagctatgttggcgagctaaagccggcttccagcacttctcacatagttcctctgtggtgggacccggtgacccggtagtgtttgaaggactatggctctgagcgaaagggagaatgatgatttgttctttgctggctgggactttgccgtggttatcattgtgattgtttgatgccatttcgagtgtggataagagtaatatgtagtagaattggacgtagatggttgccagtggctggtttgaagctagcttgtggtatagaggagaatagtgtgtggtggagaaactagtcttcgtcttcagtatattcccagcttatctgcttgtccttttatatttcttcggtgcggggtatttaaagtctaattgtcgtgtggtcggatcatacggtattcggcaatggtgatccatacgtccatggggatcaaggacctgtcacaacaatcaggtatttgatatgggcgaaagtggtgacgtgcgggtggcgacgatatcgggtgggagtggaactgacatggcagttgtacaaaggaacaccaattccctctcgcacaatagcaatataccaagaattggaagtcttggcagtgatagtatacgtactcgtacatgagcctgtatttgccgtattaccggggatctaggcgagtcgaatgcttgatgattgcggtgattgattgtaatgctatattctcaaccggacttcattccagctgccaagacataacaactatctacggacagtatcaaggtaattgttcgaacagatatattgaaattgacgagctaacatacagtcgtgagtacgttcaaccattggaaagcaaacggacaaatggcaaaaccaacaaggcaaaagcaaaggtaggatacatatagtcgaagagcacgtgacttgaacagttccttctggcagggtcaagctggtgaagcatctctccaaacagacatctgtgacacatgagagccggtatcaggacaactgatatcaaggcaaaaaaaaaaaaaaaaaggccaatgatggccaaaggtaacatgacgcgttgagaaaccaacttcgggatatccaaggcccaaaacgatatagacgcgcttttgggagaccagagtatcgtacaggttgatggtataacaaggagataagtccaaaaaacaggggggggaaatggcatacaagaaaaaaacaaggcaagaaaaacaacaaggatgttgataataatgaattaaaatcagggtatgcctcacgccacgctatgcgagtccccccagcagccagggagaccaagaatcactggaaatatgtactgagaacatccatccgacggtggaaagacataggaactttttcggtcaatgattcatttgggcttgcgccagaagtattgctagacacaagtcagcggggttcgggtacatgaatagatgtatagatatggaggtactcaccttgtgctgcttccgacagttgcgcaggcctggtttccgaagatcatccaccacagcagatcgtcgcatcgtatcatcatcctcatcgggaacgtagtaatattcactctcaagtggcttgccggcggcatccttgccttcacgggcaactctgccaataaacttggtcgattcgagaatattgcggatatcagaccgggacaggccggtggggtactcgtgtccggacttccagtacgcgggagggagattgttcacaatagtggagaagggcgtggaggacagtcgggagaacgcaagttgattggcagcatggttgcgaactcgctcggaccgttcgtcggtatactggggtttagcctcggtcgactctacttccctatcctcttggaccgtagctggctgtctaggggaccgggtaggttggagaggttgggcaggaagcaggttgcgaggagaacgagtggtctgaacgggggaatcacccgcccggaaagaagccatacgaggaagaaggttctctccgaatggtccaaaggagtgaatgataggatcattctcttcgtcattgtcggagaactcttcggatctactcagttcactcaactcgctcgcccgcgaggtgtgaagcatagcggtagcacgacgggcactctgggatatcactccagtgacggtgttgtgacgcttcaatggagagggctcatcctcatacaccactactgcagcacgggaacgagaaggtgtgaagattggcgaggatggggggatggcatgctggacagcaggcgaaggggagacgggcgatgccagacgctgacgatccaagagcggactttcctgcggctctcgtcgggattgacgccgctgagttggggttgcttcatcactggtttgttccgagtcggtagaagggcaatcccttcgttcgctgcgaggccattgcaccagaacacgagcctcgtggacatctatcatgatatctgcatctttaatgtccgaggtgaaggtctttcctttggccaagtcatatttcctcccttggcagtgaatctttatcccattccatcccatgcacacgatctcaaccctatcccgatcgaatggattcggagccggcttatatgtagccttgacatgaacacgagagatcatacgactagcagcaagttggtgatggcatgagacactggaccttcccatcagaataggctccccattctccaacaacattatcgcaggcacagcagacaaaggcgagcgttccagggcagcggagaaggaccgtgacagagaaggtcgggaggcagcgacgccacgaggaggcgaagaggacatgatatgggtcgacgaggtcgggaccggagtgggatacgtcgagacatctggttcgcgtgctacacgcttttgaggcctaggaagggagggcgacgagctcggctcaaaggcaggcagcagggctgcaggacgtttcacgcccaagatcgagccaactcgactcttcaatggagaggactccatagtagaaaggtgggatgaagtcgaacgagcactcctactcacgaaaaataaaaaaaaacctgagtcgaggtcgaggacccgcgtctccgtgttatacaaacacagagaggaacctggggaattttaaaggaaagaaagacagcaaggcctcccctagagaaacaggtgtggtgggagtaaaggaagtagtcaaggagtaaggaggagaagcattgaagaaaaaggtcgaaaggtgtgtggtggtggaatgccctggggcggagggtctcgtccaccctgcgcggaaatgcacgcttacagtccgagacgcgttcgataggcgccaaccacgctccactgcaggctcgcgatttcaattgctgtctttgtgtattgtacagcgaatgactcgtaaatagagtgccgaaaacgtgaaaaagcgcgaattaaacgtttgtttcctcttaacttttgctgtcaactctatacactgcaacgcgtccgcgtctcaaaacacgtgaccccacgcgagacagtaaaccaggtttattgtgtcaggaatggtattcatgacctcaaaattgttcttatttaccctgtagcccctcggacgatttcgaaaaagcgagtgcaacttatatcccctcttacatagtacgcctattcaagtatcaggagtcaatggtgaaatttaagcagtttctctagactcgtacatagctaataccaagtactagggtatactccgtacggagcagaattcatacaattcccagcagaaaatgcaagccccctaattccccctaaccccccacttactttacggaattgatcactggttacctcgtcgcgtctcccagccattgcccgaccacctcggtatcattttagctcgagctttggtcattccaaccgattttccttccaagggcatatgagcgaatgtccagcctgatcaattacgggaaaaaatcacgaacgccctattttttgcactgagttttttgttgacaagtgctggtggggcctcgggtagtttgattttttggtatattttctggtatagttcacttgaccggtcttgtacgaaaccgagcatgaggaaagattttcttggatgatttgcgtatctcaatgactacatgtcagctgtggagttctgcctctcgcgaaaccgatccccttgcctaatacatatatgggtctaacgcatgtgggctgtctgacggacggttatatcaaacggtacagtggaaatccacaaccagaggtattacataaagactgacataactaagcttctacgttgtactcaagttctatagtgtaatattacttgttggattgaacttttggcccgcttacctccccgagctgcggaatggtattcttcgcttgggtcctgtatagatatatatatcacccttttattccaacttggtcatttttgcctttctagtgatcccaaagccggcactcgatcacctcaatcagctttcatatggtgtttctttggaatcacagtgtcgctcccgtccaactaggtctgttcaggctcttatcattcaaagtttccaaaatcaaaccatgaactctagtatatgggtctttcgaaagaatactgcatcgatctcaaatatctaaaagatacctgccgtagctcccatatgagctcgagctctagctgtgacggttggttgggtagcgggaggcagagttttcttctcctcgatataaatgggatataaatcactccagcacaaagccacttcttagcaagcatcgttgccgaaatcaactagagccgaaggttggctgtcggactgcgcgccctctgcaatataacccatatgatgtcagtaatcgacagagacaccaagtgactccacctatcgcactggtagcatataggctatagctcagaaactctggaggttatccatgttaactggccgttgacaagaagattagctcatccattatcgaggaaaggtagcgtctatatgatgagagatcttggaatatgacttgtcagggaagtattcaaatagggagaccatgccttggttgggacggtcctagagaattttgctaaatgcgtcgtcatgcaggcgcgccgcatcgctcatcgtgaagcatatactagctaactaggtaggtgcatacttcctgaaagcttttggttttgtttgaaactcgaaggaacgatcgaggtggggtcatagatttggcgtttcatcatgtatgcgacatgtcacatatcctaagcgcttgccgccacattaataattagcttgtccctcacattgtggggaggtattacaaatatgaaaatacttaagttcatatgtcacacatggttcactggcaggttatgcaacgtgaatcttaagaaaggtctacattgactgtcgttggaatatgtagctagctctggtgcatacttgattacgcatacttgattatgggagaggaaataaaggtgtggaatatcattcgaaggatagtcaggtagaggaaaatatctgactcaagacaggcagtgcacatctgctagactagatcactcaagagcggctagccgatgaccgactgttacagaaccagctgtgtgccataatttcccccgttgaatcaacacatacactcgaacctttcatttcaagcaaggcacaggataaaccaagtcaccaagagtcaaaagagaacatcgggattcgggaaggaagatccaacctctagtcaccaggacaaaggtgaaaggaaagggaacgagggatagatttgaaatcaagaactgattggtacttgaaaataaagaaggaaatctaaccgtcaaataaaaaggatatcgctcccatgaatgtgcctgatctgggggggtaaatgtggtcataagaaataaacaaaaaaggtgcaacgagcattggatttcgggcccagtcacacgtaaaacaaaataaaacttaagatacacagaaaaaaaaaaataatgatccttcgaataagaagccgtgaatatagacagatacacatagggaagtgagatgagagcggtggctctgctcgccctagtgcatgggaagctcatcgaatttcgcttggcggggtaaggactgccgccgaccaaaaagcgcttgcgatatttagtcgtagaagacgtaataggccttgccggaggtgacaccgacctgggagatatcgttagtatggaaatttgtacaccggggggtttcggaaaacttactgtgcagccgctgttgccgctgatcagaccgttggagtcatagaacttgccatcctcgtaacggcactcatcactgaggtcgtcaccctcaagcttaacgttgaagtcgagagccttggtggtggtaggggtgttggggaagatcgacaggaactttccggaggaggtgtaaccgacacccaggttaatgggagcccagttaccgatggactcagtgccgtcaccccactggcaacccttctcagtagacacacccttggggttgacatagtactgggcggaggtgaccttgccctcccagaggaagtagtcctcaccgtcggggcaagtcaggtcgtgaacaacaccgggaacggcggagagaggaacggtctcagactcggtaccggggtagtcagtacggcaaacggcaacgttgtcggacatctggttcttgacgtggacaccgccaacaccagggatgcaaagctgcttgtagttgtcgttggtgaggtagagcttgttgtcactcttacattggagaccaccaacggactggccggtgctaccctggacgctaggccactgggacttttggtatccaggtgggcaagcgtacgagcacatggcaccgtggtggcattcgtcaccagtaacggcagtcacaatgtcgctaatcacctcgtcaaggaaagtgacatactggataccggagtaaccaccaagacccaggtagtcaagggcgatagcaccgtaatccgaagggaagtcaccacagtcaatctctccatcagggaagtcggcggtgaggccggtggcaccagagctggaagagctgcttgagctgctggtagcagcagcggctgtggtggagctagaggtggccacggctgagcttgtcgagctggcgaggatgatgacagccgaggtctcttggaggatggcaggggcaacagtagcggttgttgtaggggcggacgtggagctcgacgcggaagtcgacgtaggtgcggcagagctgctagatgggcaagcagcagccacggcagagtccagccactcaaactcatggtttgcgagaccagcacaggcttcctcgatactgatcgattgagggtcgctcgaactggacgggtccattacaacaaaatcatacacaactggaccggcgaccgaagcctcggtctcagcagcgcgcttgtggacgtgaccgtgaccatggccgtgagcggccgcgaggccagccgtcgccagcgcagcaacggtgttctggaacttcattgtagtggtagtgcgaaactgttgatcataatgtgttagttgagtcaaaatccatgtgaagttcttcgtgttcaatgattccccttggtgtaaagcggcttggacgtgattcagtccctgcagccatatatcgcgtttgttgtgtttcgaatcgtctgtatagttcccaaccgacgctcaaaaacaacaacaacaatccacaccacatcacattgcgaaagctattgcaccatatagagataaacgggaaatagcacatacatcacttcaaaggtagtcgcgcgtttgtcggagtcgagtaaagaacagcggttttcaaatgaatgtggagagaacgaatccctcgggtgtgagaaaacttcaagaaaggagggctgtggttggaaagactggggaagaagaagtcagggagagacaaaaaggagggggggcgattcggtttatgtccaaatagcgttagcgtgatagtcacgggaaaaggggcaggtacgggatacagcttcaatatacaactgtctcacactgcctaccttggtagtggaccctggacggagtctggatgctacttgttcgcttggcagataccatttaatctttctaggggttcattctatatacggagcacttctaccgagtcagtctctctttcttcatctggggagttctataacggcatgatccatgggcgaggcagttcctcttttttgtttacctttggtccctgcggcttggcgccaaagcgagattaaactgccaggggcagccaatcagaggcacgtattgcacttttctgggccccataattcaggtacaccaatcagtattcagctggtctgccgagattccttgcgtatccatgggtaccagaagcatttgatgatgttcttcattttacttattattatgtctgctttgttcaattcttgaaaacaacatcattccaacacgctattgaagttactccccccttataacgttacagctctttgctgttgcatcctaggtaatcattgcagggagacgcttgaataagactttcaccccctggcagccggacaacctgaccgatctacttccgcccagcttttccaagacttacagtgcggtgtgcgtagccagcaaggggatttcccctgacgatgctagcgtttgccggttttattattccactttaactggacacacattctagcctagtaccaataataccaagtttaataacataccagatctgacctgctcaatgcgtcgcaaataagattcaaatatcagcccacgacccaagtactatacaaataaatacctagagagtcaggaggtctagaaaacggattattcatatcgttggtccgctgtacttcatgagtagactttcacctataatcatagcccgcagtgatgacgactccgcgcatgaactgcctaaattcacgcacttctccatactcctctagcagccgagagttgctccgcccatccactttttcgataatcggccagccagtggaacaatgataggcgagttacggagtagaagccgaccgacttgtcaatccgccgcaatctttattctactgtttggacggcacggcctggtccgcgtcatagcacgctctagcagacctctagaattgaatcgaaattacactaaagaaattacactaaatttattgcatcaataactacgcggaaaaccgacagcttgttttccatacaataagttcggctgaggcgggtgagcatctgattaagatattgcctttgtcttgacgtactccgtagtcgattcacaattgctacatgtatccaagtaagcaaccagagccaacaccatcacacctgccttttcgggtccaaatattcagctccaccgtcctccgatcattccgattctttcatctttgttttcagctggtgcctgctccaaaaattgtaacctccgtcaacccaacccctgtttctttgtttgtgcttgaaagcatgttcaggtatcatacgttgtataactatgatacgaagatgtttacgcagctctctgggttatgtacgtatggagaatattatagctatttcgacaaatatcataccgttctgctaacattcaagcaattttatatattaaaaacggggctttctacaatttggcttctcggggaccaccgttcgtatcagaattaatttaatttttgtaattataggctccattttcaattccattattgcggcttacagagtactaatgtggagctgcaatggatggactctcactagtagtacggagtacccaacattcattcctaatcgtgtgggttttcaatatctgttgtagttacagcatataatatagcatagaagtacggagtacgaacctcggtaataatctggcatcccacggtcactcccgacgtttggtcttacaatatatgatatattgtggatgtggagtttcgctacgcttacttctgtgtcttccgacgtgcggcatgcaatttcccatactcagtcacctccccatcgctgcacattcaaaacatccggcttgtttggatgctaaaatagggtcaagatgcctatcaacatatattaaaacaacggtttgatctacacagagatccaacacagttgtctataaatagttatccaagccacgatggacttggcgatcgattctcgtgagatccctttagtatctggagaagcgagggatttttccagggtgtaattgtatagtatttttagataattcggagaagcctaaacctgggataatcttcgagtttattccagctgcacatctggttacttgaaacacgtccatcagccgcttcgtacccttgcatacatcaaaccctgcttccaaaagggaactaagccaatcaatcatacccagagacatagtaaacaagattaaggctccgtagaatcccatgacctctgtatatatgtgagctgtggctggagagctacctatattatgtacaagtcgcgtcatttgattccacctcgcttttactcccatagatgatacaatatgctctccgcacggaatactgatgtcactatagtaaagtcagaaccgaaaatcacgcgtaagtcctcaaattacttaggtaggggtggtaagtagatgttgcaaactactatgtcatactcgagtcggcgaatagtacatcggcggactttgggcatagactatctcgacggtggccacggtcatcctactctatgtcgcttttctctttatttcttagacatggatatcatttacgagtcctatgagtcttcgaaatatactatcacgatttccgtatgggatatctaacgagcgaggttaacctgtcttcgatgcacatgccaatcgagattcgcacttagtagatgacagataggtgcagaattgttcatcgaacgtcatatttcgcccaatgtgcctccactgaggctagtgatagataaaaattggttgccagacttgatttgaatgctatgcggataaccgataacagcggtgcgataaggcctcaggcgccaactggggtctgccaagcacggatgaactgccaccgccttccgaatttttttgagtcccgatatgattgcgaaaaaattggagatgttcatcgagtctacaacttgctaaaatgggctcctctactactcaactcacctctaaggtgacctcgggctccccttaccaacttgacaagccccaggttagtaccaataactccccagagtcaatttcgcaaagtacttatcttatttcaattaggtcctcaaagcttccaccgcgctgttgaagcacatcaagtcttctcaacaggaacaggagaagaccaacaccaagaagaccctgattggcgacgatgactccgatggcgaggacagtgcgaccaagaacgaagccatctggctcgttctcaccaccaagcagcatgtagtggataagaaccgactgaagcccggaaaaatcagcatccctcactctctcaacacatctccctcgctcagtatctgtttgatcactgccgacccccagcgtggcgttaaggatattattgcggacccatccttcccccagggcctttcctcccgcatcgagaaggttattggtttctctaaattgaaggcccgctaccagagctttgagagccgtcgccaattgttcgccgagcacgatgtcttcctggctgatgaccgtatcgctatgcgcctggtgcagaccctcggaaagatcttctacaagtctagcaagcgcccaattcccattcgtatcgctgagatcgagaaggcggatggcaagcgggtcaagaaggacactaagaagaacaactcttcctccaaggaagagaagaacgcctctttcgcctctcctcttattgtcgccaaggagatcgagcgtaccctgagctgtgccgccgtgcagctcgcaccatccaccaccgccgccgttcgggtcggttcgtccaagttcacagccgagcaactatctgagaatattgccgctgttgtcaacggtctaaccgataagtttgtcgcaaagggctggagaaacatcaaggctcttcacatcaagggtgccaacactatggccctgcctatctggctcgctgatgagttgtgggtggaggatgccaacgtgctggaagctgcgcctgagactgaagctatcaaggactccaagaagcgcaagtccgctggagatggcaagctgctcgaggagaagaagaccaagaagaccaagcccgcagaggatgaggaggaggctgcatccgtggctgcgcggaaagagaaactccagcaactcaaggctcaggcgctcgaggacggtgacataagcaagcccgtcgcaacgaaggttggcggcaagaagaagaagaagtcaacttcatgatggttatagctcttaatgttctctgcatgtaaaggtatttctggcgtacaaaatatcacgtatctattgttccaacaatttatcttataccagtaattgaaatcaatctaacagtaggaatactaaagcatcgacatacaacataacagaggaatagatctagccttttttcatcgccgtcgcatgcgtcatttcgaagaacgatcgggctatatggccgccgccgcattaaccgagtccgacctcggggagccagtcttggcacgccgacgatagccacccaaattaacatttaccgcgaatcaccgagctttaatcttgctcttcttcttatgtctggaagatcaacgcaaaatcattctaccaagttgtcattatgattccaatcgctaggcactctgtcctgcgggctgcccgcgctcagctccaacccacccggaagcttagcctgcccacttcttcggcgcttgcccgcctcctctcgaccctcgccgtcctcgagcagcgcaatggaaagctggaatcttcgtctttttccgcagtcgcggctgcactgaagctcggtggctcagtaacgggcttcgttgctggctctggtgtgaaggccacctccgctgccgaggctgctaagatcaagggtgttgagaaggtgctggccgtggacaacgacgcatacgagaaggtaaatactctagcagcctctgaaatcaatttcggtagaaggagctttggctaacaattggatttcttgcatcatagggcctcgccgagaactatgcctctcttcttgtcgagaacatcaagaagggcgaattcacccacgtcattgcaggccactctgcctttggaaagagcgtgttgccccgcgtggctgccctcttggatgtgcagcaaatctcggacatcaccggtatcgagagcgaggacagtatgtgacaagagaaagaagtttgacatgtgatccggcaactgaccataatccagctttcgtccgccccatctacgccggtaacgcgattctgaccgtccagtcaaccgacaagatcaaggtgatcacagtgcgaggcaccgccttccaggacgtcgaggttgagggcggctccgccgaggtcgtcgacggagtggaccccaacgttcccgcgctcaccgagtgggtgtccgaggaattggccaagtcagaacgcccggagctcgccacagccacacgtgttgtgtctggaggccgtggcttgaagtccaaggaggagtttgaccgcctcatgcttccgctggcggattccctcggcgctgctgttggtgcttcgcgtgctgctgttgacagtggcttcgccgataacagtctgcaggttggccagactggtaagaacgttgctcctcagctctacctctgtgccggtatctccggtgctatccagcacttggctggtatgaaggacagcaaggtcattgctgctatcaacaaagatcccgaggctcctatcttccaggttgctgatgttggcctcgtcggtgacttgtttgacaaggtacccgagctgaccgagaagctcaagagcgcctaagttggtcgcgcgaatttctcttatgtatcacgacctatcgagtaggttggtaccttttttatctgttaaatgatcgtacagtataccatttactagaggatggaaccaagattggttggccaaatttccatcatttttgttctgattttagtgaaacaattcaatgctttaaactttacgctgaaccttgaaaagaatctagtcacaaataaatcattgtttgagtattgggtacacttgtagatacaatataagtcttgactgtaaaaggactttgcggccaaaacgggactagcgcgttctgcacgcgtcgcgcgtctatcagagggggattacatcggagaccattcaacgacatgaaatgtccgaacgcttgaatgcttccctcctcgccatcgttcctatcctcgtttgaccccgccgtttacctccactcggaaggacctggcaacacaaacccaccgtctgaatcattctccgacgatctcgaggcaattcacctgcaccgccgcgatcagacccgcaacggaatcgtgattcaacatcgagcgtggaatctatctgacgtgtttcgtagcgaagacgacatacaacccggttcgcaatctcaaacccgcattgcctggagtcgtggcactgacaaccacatagtagatacgccgacgaagaacgttacaaccccgagaccattttctcgcactcctactcgaaatctgtcttttatgccatcctcgccgccggtttcgagaatgccgttcatagcgtctccgggcgcgcttacacccacatctggcaatgcgaccaacgattcgcagaagaggaaagtcacaaattcagagggaggtgtgcagctgacagagccgaagcgccagcgcatggttggaggcttcgttgatgatgacgacgaggacgaagacgacctcgctgctttccgggacgagcagatgaagaatcaatatgacctgcccgagcactttattcaagagcctccggcggaactccctagtatactggcaccgctgccgacatctactaaattgaatgctacaattagctcttccaggataccactacacctgacaccccggcctgctccaatggctcccaagagattccagatcaagacttgtgccggcaaggcccatactgtcccgcaaaggaaggcccaggcccccgtttcgtataaacaaatgatcgccaatcggtcccagacagaaccaggaaaggcgacgaagagctattatggtatcgacatccacaagttgctagacgatgccgccaaggacaaaaagcccgtgaacaaagtccctcaaccacaagtccagcaaaccatcgaagcgaacaacatgagctcaaagcagaagaaattagactctgcaatgtggacagagaaatatcgtgctcgtaaattcaccgatctcattggggatgaacgcacacaccgagcagtcctacgctggctcaaggggtgggagtcaattgtattccctggtctagccaagtctcgaccgaagaagcctgcccgggaggatgaagaagagtacatccacaggaaggttctcttattaagtggccctccaggacttggaaaaacgacattggcccacgtatgtgctaggcaggctggctttgaagtgcttgaaatcaatgcaagtgatgatcgcagcagggatgtggttaaaggccgcattcgcgatgcattgggaaccgagaacgtcaaaggtatgaacgtggaggttggtgataaaaaggtccgccgtgccggtaaacccgtatgtgtcgtggtggacgaagtcgacggtgtcactggtggttctggaagtggtggtgagggcggcttcatgaaggccctcatcgaccttgttttgcttgaccaacggaacgcaaaatggtcttcggagggcaataatggcaagaagcgcaagggtgacaacttccgatttatgcggccgttgattttggtttgcaatgacctctatcacagcagtctccggcctcttagggcatcgtccattgcagagatgatcactgtccgtcaagcaccactggagaatgttgtccaacgagtcaagttcatcttcggacgcgagggcatcccctgcgacagtgatggggctcgaaggctctgtgaagcagcctggggtatggcgagcaaaaaaaatcgcagtggcaaaactcaggggtctgctgagggcgatattcgtagcgtgcttgttgccgcagaatttgtggcacacaagcttcgaaacgagtcgtcgccatcatcactcaggctcacgaggaactggctggagactcgagttctcaatgcatcgaccgagggtagcgcattcttcaaagagttaagtcgtgggggtgttcgtgagattgtgaaccgtgtgtttacagagggggctggcttctctgatgctcctgttggcatgagtttccaagatcgctttgatgccaccaacagccgtattcctgtcggtgtggcagatctgcgaaaacgacacgcaatcaaccgattgcgagaaatggtcgattccagcggtgatcatgaccgctgtgtatcggactgtttcgcttcgtatcccacccagcaataccaggatgataattatttttccaaacccaacgccgcccacgactggcttcatttccatgactcgatcagttcgaaagttcattcatctcaagagtgggaactgattccatacctcagccagtcggttgtcgcattccatcatctatttgctacagctactggcagaaccaccgacgacgataaaaacgatgatgacgaggaagctgaagagccccatcctttctcaggacccagagctgactttgctgctttcgaagcacaaaagcaaaaccgcgcggccatgactgcattccacgcctcgttttcggcacctatggctcgcattttccgatcgaatgaaagtataatcacagatctggtcccttacttgatccgcatgctatcaccagacgttaagccggtcatcatccgtggaaacggtgagcagagaagcaccgccaccgtccgcaaagagtccgaacgtgcgcttgtccagtctaccgtgcgtgtcatgaccgggatgggcgtgacttttgaaaaagtccgagtggaacatgagggaagccacggtggatgggcgtacagaatggaaccgtgagtgggatttcaaattttccgtgagacatacaaagctaacatatcctcaaacagaccaatcgactcacttgtggtcttctcaaagatcaagggtagcaccatcgaggcttcgggtggcacagcgccagtgcggtatgctgtccgccaagtgctagaccaagagtatcgcaaggcaacgacgcgcaagcagtctgatgccatgggcgcgtctagactcggcaccaggggtcccaggaactccgctgagacggccgcagccaaagcaatcagagaagcagccgtgaaacgggatttctttggtcggctggttgagcagcctgcgccacagcctaatgatctagacgacagctgggctgatgagtcgtccaaggctgggcggaaagtctgggttaccttccacgaaggcttctcgaacgcggtccgcaaacccatatctatggcagagctgatggctgggttgtaatatacatatgcattgagttccgagttgccttctttgagcgtttgtcatcgtatgctggagtttttcccatacatttgttgcctaccttccataatgattactgtttttacgagttattgaataccaagcactaccacattgcccgataaatatttgaattgctttacttgaatgagaacataatttgagagaaagaacttttaacatagagatattcctctatttcaacaagacatttgaacaccaagcaaaccagccaaacagcccagattatgatcgttgaacatcaccataaggacagacaaatcaaaagacaaatcaaaagacaaatgcaaatcacaaattattaaacatagtatgtggtatccaaatcattccatcgtgaggcgaaggggcgaacacgtgcacccatgaatcgacgcagtatagcatcgaaaaaatccaacaaaccaagcaccaaaacagacaacgggaaagaagaaaagagcccggaagcatctactcgaggtatagcgagtggaccgagcgggtgtgatcataatcggcgcagaagtagatgcatccatccactggttcgaaaccacttagcgcaggctgaggtagctggcaagcgcctcgttgtgtatcttcttcttctcaacctctatggcattattgttgggtacagagctctgggacttcgagccgagcgagtaccacttgtggctcttggttgatgcgtctgatgcattgagggttgtcgctgtggagacggtcgagtgggttgaggctgcgctcgatgtagtcttgcaagacgctttggaggatttggtgaacattttgtgtgtggttttgggggattttggaggattgcttgagaatttcttgacagcgaaggtaagacgtaaacgaaaagtaaacgagtatgagttggttcggtgtttatagttagcgagcaatgtgtgatgatgatgctgattttcagacctcaaggcttaatgctttgcaatggattggattgggaagtttctttttacggagatatcattgagtctttatatagagcttgggtgattcatttactccgtgtcaggctgccattccgagaagaaagaaaatctcaaaacgctgacgccccaccacctcagtcatagtatgaatacatcgagtctagaagcttttgcactgtcaaaggctggtaggacaacctaagaaagacgtcagtagtcacagccgcctcacgtgtggagccgctaatgatcggagtaagagtcggagttcgatttttactggcgagcggactacacgagggtaagactggtgtggaaaaccaaaatattggatgaataagtcggtcagaattatccaatgggatttctgagcgtgaaggccaagaatatctgataaatgaagctgcttgttctctggggcatgtgtatctatcctctagacccaaacgacgacaccgcacagtgcggagtcctaattcggtaattaattcgcacaccttttgatatgtaactcgtgaaggcttccaattttagaaggatcttgcgaaagggcgcagtcaattttcagtgattgtgcggctttgcatcttactagtatccacgtgttagaccgagctagcgcagctaaccatattcctatttcggagttgaggtctggatcttatccgaaggaatcttagataattctagacaatctaactaggcccacagggttgcatgttatttcagttatactactcggtacatagaaggcactccataatgtgcaagggtagctttccgctgaataacggcctgttttagaccctttagtgactataaattgcatagatgaatacaacataatatgtttgagaatgaatgcctagctgccaaggcgttacgatatagttacgaagtggcttaggatgactcaaagagcggggttgtttacggcttcgtaactttaaaaggatgaggcctttgaagatttgaaatcagagtacaaaggatataatgggatgattcggacgattacaaccgcgggcattaggagttagcacgatacagggatgtgctggttttaggtagtccgatgtagtccgaacatgtagatctttattccgatgctaaatttttagctcacccaatgtcctccgcggccgtcagctgagcaaatgttattaatccgagttccgagagctcagcgaacgtcagacatcagcgaatatcgggattcttttttaatatagtataacagcttctgacctaatgactaattattacataaagataatactgtaaataatgatcacggggtctctatgaacgtctattataagctatgaagacatcctagtgtgaagagagatctcgacattcgctaagacccctctgactagatagatggtcgaaaagcggattaacacggattaatatattttccttcacgctaaattagcggtcccatttcaacattcgatcagctgtaagccccttccaaaggtttgatttgaaatggaattcgatagagttagtctgatcgatgaggcttccaaccttataatttgatcagagccgggaaatttagagcgttagagatctttctgccatccgatctaattaatatactctcgcaataccgcgatttccgttagctatgagctcggaatcgcttcatttttgatatctttatatttcccttcattatcctcttagtatttataccaattgctcccgaattgatcccggttatgggtgagtaataaaagacttaaccctaaaccgaaataataattatagactgtgtcagcgtgtcttcctctgatgggagctgtagctggaatgaagtgccaatatacgattggatatgtcttgaacatattgataggatttttttgaatagacagataggtattaatgacattccaacgttccaagattgaaactcaatgtaagagattaaccatacggctttaggtcggtccatgtcgcggtgtttccgatccttcttctcagagcggttcttttcgcattcctttatgaactaaccgggatatccctccttggatatttctccttggcgttcattcttttgtgtaagatgtttgggcgcacggatacctataaccatggctacaagctgtgagtcgtcctagataatctttctgatcctgtggcgaaactttggatggtctgctatagcccgaaaaacttggatgttcaacgaattggccgaaagaaacacgcgtaacacgcgtaaggaggagaatggtgaaatcttgctaagggattggcacgttaagcgcaaatatttgacatctttgtttaacagaaaggacccaatggatgaaattatattagggggaaacgcagaaaccacgggcattgtgttactattccggacgaggggactggtgactcggaagtatgtaggtatatcagggttgaaaggtgcgaagttacaaagatgtcaaaatggtgaaaacttcaaagccaagtggcccaggcccaggatcaatttcctgatttgaactgatttgaacatgcaactagttaactacctaggtaggatgaagataactaaattagtcatcattagtcatcacctgggcaggtgacctcgggatagagacacccggacgttcgacttggcaacatcacaccggttctcgtcggttaacgcgaaggatttcaactgcctcgcaatgacgtcgaacctttggaccatttgtcagcttcaggttccacagtgccgtatgtacaacgtacgttgtaggacaatgaataatcgacattgtggggtggtgagggggatggaagcttgatttaagagtcccagtcctgatctgattccttttcctttacttctttatttcccaccttacaatccaaataaatacctcaccaaaaccaacaatgtcactcaagcctatcaccgtctacgggcatgccacgggccccaatccctggaaagtgatcatgatcctggaagagctggatatcccctacatccacaagttcataaacttcgcagatatgaagaaagagccattcgagtccatcaatcccaacggacgcgtccccgcgattgaagaccccaatacagacaccaccctttgggaatccggcgcgattctcgaatacttggttgacacatacgacaagcaaaacaccatcagctttgccaccggctccaaggactactacctcgccaagcaatggcttcacttccaggtgtccggtcaaggcccatacttcggccaggctgtttggtttagccgctaccacccagagaaggtgcaaagcgcaatcgaccgctatgtcagcgaaatccgccgtgtttctggcgtgctcaaccgggccctccaggggaagcagtatctcgtcggtgacaagttctcatatgtcgatgctgcttttgttccttggtatcagattactggccggtttgggattgatatggggaaggagttccccaatgtcgctgcttggttgaaactggtgcaggaacgtcctgctattgctaaaacggttcaggaccgggccgaggcctccgcgcagcagtagacgaaatcaacatgaggaggatatttgagagtggatagaaagaaatgaaatagaaattcacaggaatgcgtcggcgctcatgcggcctctgtccttgacaacgtgagactttaataatctggtccgaaatgatagcgttacgtgtaggaacataccattctctgcgctagtacgtccccagatagcctgccatgtcgtgtgtcgcgcgcgaaaagagggcgctgagagatgagaacaaaacatgctaagatttgtgccttctctcgggatatttcaagatccccacggcccctcgatttgccaattctacagtgctggataaattcagattcttgaacgaccactcgaagactcccgattgttgactgatagctcggcagctacatccgagccggataatcaatactggccatattttggaagcaaagagcagatcccaggatggctacgtgataatgatatattttggaagtccacctgatgcccacatattcttacaaacgatccttgcgtatatggcgctgtttacacatggaaacaatgaatatatggacccatcttctgggctcggtggcctttattgctgtaagtttcactccgaatcattccgtttcgattctgaaagacctgaatttcacccacggcgatatatttgcttttggatcattcctgacctcggcaacctgttttgattccacacgctaaagcctaagaagccactcttacaatatccaccatctctggggcaaaatgctgttgctttggtggctgcagatgactaccttcggctgcacaaaatctgccaagtcacttcgcagcgcacttctattgactactagccggtacctgaatcaaataattcactaaaaggcgctagcatagtatggtctgggggttcgagattttaagcttagcctagatatacagagagttagagaataaaacaggctttttgctcagttaacggctatacactgaaaataaaaggaatttccctaatataatcactgtagaatgcagaaatttgagagacatctaagaggtcacagacaatacagccatatgtcttttccttcaaatattgccttgtttgatgactcgcagaggccgtgaaaagaggataccagtcataccattaatattgcggtcaaaatagacctcgggagtgactgattcttccaaggtacccagggtacttcttctccatctcaaccatggaacgtacaatccgtctccaaccacggctcacgacactgaccacattatattgatctataaggaacaacgcttcttagacgtcagatggtatggtcattgaaagaaatgtccacctcaagcagcagcttggatacttgctgctgggaaagcgaccttggcccatattgatgcagccatcgaacaacagcccgtgatagtatataactatgtcatgtgaaggcatgctagttctacaaaacgccattactctccgtttacaatctaccagcagaaggcttcacttgcaaaagaaaaatgagcacaactccttctgctgcggggaggcctcagtggtgttgcataatccttcctttttactgttactgttacactcgcttcttttatctcacaggcgaaatacattaggtaagatcggcgcagaatggctcatgtcaatttcttcggtctttgctaggatattcactcttctgcacatctccgctgtctgaatgttcggtaattcccgagttttacttgcatacgtttgattgtttgccaatcccttcatctatcacagacaactccaatctattatttcatatcatattaattgcagattagagattgaagaccctgagatagccgtttgagccatttcttcagcgccggtggtctccggtggccctggcatgttagcgccgaccccgcaatttcgttcacgaatcatactttgtaggagatcaccgtgttcttatctcctgacaacctcttgcatagatcttcttttttggctgtaacatcggctggcttcatggcaacgggactcgcagcaagtggaaaccgccggcactcgagactatataatgtagttgggttttcgctgaccttcataaacaaacaccccgcgacccactttggtctgtgacccctttgaagttttccaacaatggtgtctctattcaggattgctttcgtcaccttcggggtgattcatggcgcaaatgcgtggggcgtactaggccacgcgactgttgcctatgtggcacaacattacatttcttctgaagccgcatcatggtaagtcctccgaaagagcttccagataaagacagtatccaatgctaatctatttgaagggcacaagaaattctcaatgatacttccagctcatacctagcaaacattgcttcctgggcagatcaataccgcctcaaagatgacggcaaatggtcagcccctttgcactacattgatgccatggatgacccgccaacaagctgcaacgtggactacgagcgcgactgtggagctgaaggctgctcgatctctgccattgccaactatacccagcgtgcaggggatagcaaactcactactgccaataccgccgaagctctcagattcctcgtgcacttccttggcgatctcacgcagccattgcacgacgagaactacgaggttggcggaaatggcatcagtgtcactttcaacaactactctgacaaccttcattcggactgggatacatacatgcctgtacagctgattggcggtagttcgctcgccgatgcgcagggatgggccgacagcctggtcgatgaaatcacttccggcacctacaaaaagcaagcagcgagctggatcaaaggcgataccatcagtgatactatcaccactgccactcgatgggcatcggatgccaattcttttgtctgtactgttgtcatgccggatggagccgctgccttgcagactggcgatctatacccgacatactacaactccgccatcggcacgatcgagctccagattgctaaaggcggctaccgactagccaattggctcaacatgatttacaagcagaatgttactgctaagaatacgccagggaaattcggcaaagggcaccgacagcctgaatttgtccgcgagcctcaccatgagcctaataagatgagccgcgcaaatctagctagagctgctatgggaggatcttgctgcaaatcagaaggacgtgagcatagccattgatttaatggcatttgtagatgttgtggattcagctgtctgaagccagccatccttgttaggaccattgttgatataatattactagctacatagacatcatgccttttctttctcgctatccattaattttccttttatctgctataaaaacatacaacagcacgtctaaggtggttgtcgcctgcgtccacggttcgggcacgggtggctcgccgctctatctagggcaattagggcggattatccccgttgcgatgtttgagtcatcaggcttgtctgtcatctttcttttcagcttggaatgagcctattttggagattcattatgatgagaacaaaaataggccaagtttcaatgaagtacagcaagttacatttacctattctgatcaaaaaaagctgtaatatcatctttcccctctgctttccactctccagccccgcttagcaagatgtgtactaagcaagacttaggttcacggataacttgtgcgcgctattatatatactggtcttttggctgagcggaagagacgtgcgcaccggcatattctttacaccaaattctatacatttcgcttcccggtttaatattcaaaggttattagttaacgtagtccacagccgagccggctataccagccgacatcacataataagtgcgatgaattacaacatgatatctcaacaacggtggcctataatagacttttgtttcagcctaatgggtttatacgaagtccagccttttttttaagagaattctagaaatctaataattcagtgattatatttttagcttttagccctgtattttcaaacacgataagctttttactgatcttacaattatactttttcacccaaactagttagattgtgtctcactagtctataatacgctttcgttccagaccgacataaactttcaagagtaagacaattaaacagaccaatgagatatgattctacttattccgaaaggcgattgtgtgcacgcttcagacacattactgtctggtgggacataatctagacgtaaatgagcgcgaaagcagcgccgagtacagccatggctcccttggggccgctgagctgagatgatgcagcatcagtcgagggtacagcggaggcggaggcactggtggatgaagagtcggaagaggaagtggtggaggctgcgatgaaaaagttgtattagtatgattgccttgtaaaattgtgcggagatgcatcatgcctgaagaagacgaaggatcagtcgacgacgtggatgtcgaagacaccaaggatgtaagggtgggggtgacggatgtaaaagtggtcgtcgcggaagaagaagtggtggtggtggtagtggaagaagaagaagtggtagtagacgtagaagaagaagacgtggaagtagacgtagacgacgtggaagaagacgtggaagaagtagaagaagaggtggaagaagacaaggatgtagtaccatcatctgaagcgcccttcttgacagtaaaggtgtcactgacggcgagctggcccccagaatcaattatctggatctcgtagtcatctctaaggcatggcagaatggtattagtgttgttcttctctgctcacccaccctatcttctacatacccgttggaaatgctagggttaggctgggtcgtgtattcgccctcagaggtcttgacgttatccgccaatttggtctggaaggagccatccttcgatctcaggatgatgctgattaccgaagggtcactagaaccgctagtgaatttgatagttttggcagtggagaaatcccacaccgagtctgacgagggagcggtgacggtgatggccaaagccgatgagaggaggctcagagcggtgatgatgaatgagtagcgcattttgattgactggaatttctgaattgcttgatggcgagctgatgggaatgtccactatttcttaggataagactatataggaactagattgttcgaagatctatatacagaaatcagtaactttcagccgaagcccagcgcattgagaatacgagatagtaatccaaaccttgcatagaagctgaatatgatatgaacatgcgctgagcctcttgtggagacactgaaaaattcaggggtcattctggtgaccacgtatattgtagggtagcaacgaatgggcattgctaagatcatcactgcaccagcgacccgtcctgttgtgttgagggtccatccaagtaagcattgcaccttatctttccaatcaagtctccagcacgcatcgtccttgctaataaagggttaaacttaggcgaccagcatgtcagcgctaatttagcgtttgggggtgcagcagatatggagtataccgacagggctcggaaatcgaggttatcataatggagatctattttcgttgtattgtatcgtcacttacagccgagaatgaataccggtcatgactggtaatattcatcagatgagattggtaggtatgccgtcttactctgctgcgcccaatgttcaaaagcgattgtcggaattcagctccaagtacggagtttctatgttggaccttactgtgcgtagccagacgagaagcggtagagttgaggtttctaattagggcaagttgcccgaatgaggggtgggtgcctcaggccactatctccattctaaggttctatggagtagctactcaacacatctcctatgttccatggtaattcacgaggtaatatgaaagcaatagaattaattatacggaggatctagtctatagtaaaaccactgcataaaccatcaaacaacgtcaacaaacaaaatcaaaaactaattcggacaggaaacataattaaagcggtaggaatggcggtctagagatagatggaaacgaaggaggtggtcaatgcgaccgtgactatcatctcccacgacaagctgaataacgaaaccccagcgccggtggaagcctttggacttgctgcggaggttgtcgatgttcgggtgtgatctccacaaatattgctgcttcggttcaggctttcagtaggataatacacccgaggccctccatccgagctgaggtccacattgagatttccgcttgaatcggtcacatatgttttgcaagacaagagctcgctcacattctgtccggatgaaaatcctgtgccgtcggagccaagcgtgattttcgtggtagctttgcgggatggcttggctcccaggttggacacgacgctcacaacctggttaccggcaaatcccttgcgcatggccaaaatgtttgttgaattgtagatcggcaatgagaggtatgatagatagtcgacccctgacttcggggcgaccgtagacttttctccgtcaccgcttgcatatgatctaatgcgattcaacgattggactagcgaaggtagggaggtcgagtgcattgagtatttggtaagccatagggcctcccggttgacaggattgaatccacctgacaggtgctgttcctccccgtagtagactgtgttgcgtttattagtatcgttggctttcgtttctgttcgagggggcacaacatacggatggggataccgtcagcgagcatgctgattgtgagaatgttgcgagccagctaatcgggagcgacaaagtcaatgcgtgctgacaaaatacccgatgcactcgacttaccgatatgtctgaagtatacgagccaaagcgagcgacatcctgattcgatgtgaaagttcccaggggcagtacgtcctcgcactgtttcctgacgtaatctatagactgtacgattctgttcaggtctccgtcggtcgtgttgaaagcctctgtgaggatataatacctaaaagtgtcaacacgccctccgttcattttgatgaggtactcacaacggataattcaaaagtccgggtagaccgggctgtagagaacagtaaccggatgcgtctcttgtggcgccttcgcccatagtaaaaacaccggccgacttggtgaaattggagaagaagacggggggaatgttcaagacactgtcgattcgcaggccatcaactacaaagaataactgttattaaattccttggagacataggagacacatagacatactggagtagttggaaaccaactgcgaaatccaggtgcccagcatctgctggacttcctgatcctcgtttcgcagatctggaagcgatatggtcgtgtctcccatccagcactgataaaggcttagcaatgctctcacaaatgctatgacagacttacatccagaacacaggtactgtttacggggtcctcagaaagtagcttgtagtcgtggaaatacttctgatcattgaatggattgaacttgctgtagtcgatagtggaggcatttccagcccaggccatgtcaccaacgacaatatccagcatcaagtactattttatatgtcagttttgggagtagacatggcagccggcgactcaccatgccacgcgcgtgcaatgccgcggataacgcttcgaggtcatcggaagtgccaaaatgggagttgatggaataaaggtcgtttggccaatacccatggtatgctatcatccatcaatcgttagttctctatatccgttcacagtcaatatgaccatacctgagagatccgccgtgcgagttgactcctggctctgcactggagagatccagaccgcatcgaacccgagttcctgaatgtaatccagcttattgatgatgccctgcaagctccctccacaatactctcccagagctgcaacacaaggagcgatggttgaattatcggatcgagcgaagcgatcggtgaccacttggtaaacggaccgaccgagccattggtctcgggatgccgcatgtactgtcccaatggcggcgaccaccaaaaccttccaccaccacattgtcagtggcgcttgcatgacaggtcaaaggtgaatcaaatgacggatggattcagagacaatgaaaaggctacatatgtacttaaatttattgacaatgccatataggctgaaaattatttacggtgaggtacgtgtatcttgtaccgtatgtgtaatacatatcttaacgatctgtattatgtcggcccgatcggcaagctttgctgatccttgaaaatcccgcgaactcatcgggcacatattgcttccgagggacggagtggccgtgaaggaaagccaaaaaaaaaagcaataatacgagacaacagcaataagccaccttatcgtcatatccaccctttcttataggtcagtcctgtatcaggtatgacgtgttctatcatatattaggcgggatacccgatctggcataatatacactttatgatcttcggcacgactggtctagaaaactcgtatagctttgcagcaaacacgtatatcattctccacataagcaagctatcgagcaaagacccacttcgtatattgggttcagggctgtggaccactccgaagatcctataccgatgcatgtcagcttgcgatctattgtccagagttatgaccgctcaatcgcttagcgtgagtatggatatgctttactgtggattgaggctgtatagcaaggctggatcatgtctccagtggttcgcctaattcctgcgtctatgctgattagtattgaatcaattattgcattggcctggacatctccggagttttcattatctttcacatgcttctcttgcgcatatgtgccctatgaatcgttcactatctttccttctatgagttatcgcattcttcttggtatgcaccctgtggttttttgactgcagtcgaggctcgaacagcgtgttctgtgaatatcaccatagtggcattcactgtgcggaatggagttgctcacttccatcactcaataccttgccattgttgcaatatatatacgcattgtacaatcattgccctatcttccagaggaagcagactggaatctcaatcaaaatcagacagcgacacatcccctcgactactcgggtcggtgggatgaccacacatacaacccctcgccagagaattggcgattcccgttttacacgatatttctcgacagatttgtaaatggcgatccgagtaacgataatgcaaatggcacacagtgggaacacatcttgacctctaacgagttccgccatggcggcgacgttcttgggttggttgatacgtttgattatcttcaggggatggggatcaaggtgcgcttttttgcttccggaagattggacgtggaaaatatattaaccatatccagggcgtctacctcgctggaacaccgtatatcaactttccttgggccgcggatggatactccccgctggacctgaccctgctggaccaccactttggtacaattgaagattggcgcacaatgatatctgaggcacatcgacggggaatttatgttctttttgataatacctttgcaacgtatgtgggatctatctgcgcaacctccgatgtcgtctgctgattttgcacagaatgggcgatcttatcggcttccagggtttcttgaacaagtccgcgccgatcaatcccaacgagtatgactctgtatggaagtatgaccgtcgatactgggactttcagcctggaaatgaagttgagagtgaatgtccctgggagtatcctcggttctggaatgacgacgggaccggtttgaccaccacaacccttggtccttcatgtcgggatagtgaatttgatcaggtaacattccctttctttcgacattgaacatgactgacccctacagtatggagaagttgccgcctttggtaactacaccgaatgggaaggacaaatctccaagttcgcatttgttcaggatcgtctacgcggatggcggccggacgtgctagccaagatcaaacacttttcttgtctgaccatcaccatgcttgatatcgacggatttcgcgttgacaaagctctacaagttacccttgactctcttggagaatggtccgagtatatgcgagattgcgccaagcaggtgggaaaggacaatttctacatccccggagagattgtgggaggaaactcttatggctcgctttatatcggtcgcggtcaccagacaaatcaaaccatctccaatctgacggaagcttttatgatgacgaacaagacaaataagtcagatgaggatctcttcttgagacccgcggagaggtccgcattggatggggcggcgttccactacacgttatatcgtggtctgagccggtttctagggttagtttcttcctttcaccactttcagtttactcaagctaacatcgtcccgttcagtctggacggcaccttcactgccgaaggtgacccgcccgtcaactttgtggatacctggaatggtcttgtggagaccaacgatatggtcaacacgaacaccggtaagttcgatcctcgtcacctgtttggtgtcacgaatcaggatgtcttcaggtggccagggatcaaaaacgggacccacaagcagaatttgggtctgtacatcgcttcgttgctcatgccgggaatccccatcctctcctggggcgaggaacaggatttctacgtcctggaaaaccaggctgacaactatgtcttcggtcgtggacccatgtcatctgctcaggcatggcagctacacggatgctacaaactgggatcatcgaaatacgttgatttcccgctcgaccgctccctgaccggatgtaaagatgattccgtcagtctcgatcaccgcgatccttcacacccagtacgaggcctaatcaagatgatgtttgagatgcgtcaaaactatcccactctgaatgatggctggtaccttcagcaattgtccaaccagacgttcgacatctaccttccaggtagtggtggaacaccgacagagacggggatgtggagtgtcatgagatcgcgctttgcggatgcgcagaatttcgatggccaaggccaggggaaccagagcgtttggctggtgtattctaatgacaacaaaacagtcgaacacaaattcaattgcagcagtaaggatgctttgatctcgccattccccgcgggaacaagggtcaaaaatcttttcccgccgtttgaggaattgacgctggccaacagttcgactaggcttgggtatgattgctattctgagattgattgctgttactgacaatgagcagattcgaagggtctaaagttcccaacgggtgttatcccaaccttactatgccggcctggggtttcaaagcctttgtcccgaaggataacttcgtgcagccttccccgtatgtaacccgcttctccccagggcatgacgctcggcttgtgccccagggaaaaagtggggatacagttcgaattggcttcgaattctctcaggagatggactgcgtggatatcacgaactcgctaacgataacgtcaaaagcgcttaacgacgagagcccacaacttgacactacctcggtctcttgtaaaccaattacagagactgatgttgtgacatggcccggggcactcactagcgttttcagctacgaagtagatttgggcaatgtcttcccaggggttcacagagtcacacttaccaatgtgactacagcagatggaaatcaatccacaggtgtgagtaaattcctcgctatacagattaagaaagtctcaatactaattgaggcagtccgttgaccactttcttttccgtatcggagagataaacaatccgatggtctggccacagttggccaactacagtagaacgctattgttcgacaacccgtcgtctgaaactgaacccttatcagtaatgccacaggcccctggtgcagacatgtggcgttattcgctggattttggagctacattcagtaactggatgacatacaccggcttcaacacttcgatccccggcaaaaactggtccggcactgcgaagcaggcctgggaaggagaacacatccttgcccaatactggagcaagttgaccggaagtagcgctcactggcaacatggagacacgcaatgggcatacaagcccccacgtcgcttcccaaacctcttcatcgaaggcgagttcaaccagttcggatatgacgctggctattccaacaaaatggctctcagcaacgtaagtggccagtgggaaatccacttcatggctgaatggcccgtgcaagttgcattcaacgcctgggggttgaacgaagacggcttgcccgatcagacacaggtatttggggatattgacggagacaatgtcctggatcaggtccctccagtcacgcttctgagcaatgtgttcaacgttacaattccacccccttcgccctatctttccttcaagctatcggtgggtgacggcgatcttagggtctacgctacgcccactggatccaggtgggttcagctggccatctttattgtgctagcaattgtgcctgtcgctaccgctcttggcgcggtttttgtttatctgaaggccttttaccaggtcaaattcaatcaagtcggtgtgaccgagaaaagatcaagtttcgctccgctggtgagtccactggtgagcgtctttcaaaaggtggctcatcgatctacgaaccccggacttgctctcaccaatgtgggcccgttcccatctgaaaatggaggcgtcgttggtgccacggtaaacacctgccgacgaaccgtgctcattgcaacaatggaatacgatattgaagattggggcattaagatcaagatcggtgggctcggtgtgatggcccagctgatgggaaaacatctagcccaccaggacctcatctgggtggtcccttgtgttggaggagttgactaccctagggacgaccctcgtgagccgatggtaatcaccgttcttgggaataactaccaagtggatgtccagtatcatcagctgcaaaacatcacgtacgtcttgttagatgcgcctgtgttccgagctcaatccaaatcagagccgtaccctgcccgcatggatgatctggattcggctatattctattctgcttggaatcaatgtattgccgaggccatcaagagatttccggctatcgacctctatcatatcaatgattaccatggcgctgctgcccctctctatcttctacctcacacaatcccatgctgcctatctctgcataacgccgaatttcaaggactctggccgatgcaaactccacaacaaaatcaagaggtttgcagtgtctataaccttgaccatgcattggtaaagaagtatgtccaattcggagaggtgttcaaccttctacatggagcttccaactatctgaaaatccaccagaacggattcggcgctgtcggtgtctccaagaaatatggcaagcgatcgtacgccagatatcctattttctggggtctcaagaacattggagcgcttccaaaccccgatccatctgacatcgccgagtgggatcaaaacgcaaacaacaaccccgaagacgttattattgacgctgagtttgaagccagtcgtgccgcactcaagaaacaagcacaagaatgggcagggcttaaagttgacccagaggccgagctgtttgtgtttgtcggtcgttggtctatgcaaaagggcgttgatctgattgcagacatcttcccctccattttagacgcccacccaaaggttcagttgatgtgcattggcccagtaattgatctctatggaagatttgctgcgttgaaattgaatcgactcatagatctctatcctgggcgagtcttttccagaccagagttcactgcactaccgcccttcattttcagtggtgcagaatttgccttgattccttcgcgcgatgaaccgttcggtttggtggccgtggaattcggacggaaaggagctttgggcgtgggatcacggtaagacttacctggcttgaatctaccaacagtgctaacttatgttccttttttagtgttggtggccttgggcagatgccaggatggtggttcacaatgtgagtttccttctctctctctctctctctctctctctctatgttcaaactaacacattctagcgagtctatgacaaccaaacatcttattcagcagttcaagatggccatcaatgacgctctgaaatcgtcgcaggagacacgagctctcatgcgtgcacgatccggcaagcagcgtttccccgtagcacagtgggttgaggatctggaaacgctacaaaccacctcaatcaaaaagcacgccaagtactctaagcgccacgatcgtggttcatggagattttcccgtggcagcactcttgtcccagaaagcatccctaaagtctcgcccagctcagacaacagccgcgaacagagcagatcacgcggctccaccgtatctgtcccaccgagtaggccgattacgactgagatgagattgtctggacctcgaccaggccttgactatgttccctcgccgacaactccgtctttcagtcttaacatgtccgacaacgagcccgattctgacgccgacccaagacgcagacctttgtcctccaaccatctcacagactcgcgagtcgtttacacctcggtaagcgatggagaagatctcgagcctatttccggggacggcaatgatcgtctatcgccatttaggacacctaccgtttattttgctcgatccggtgccagcacaccagctctcagtgcaggatcagaagacggtgtgctgggccgaagagatgcaagggcgtctatgatgagtctggtcagcgtggatgatataacaaaggagaaacaacactacaatctccagaaagttgatccatttttcacagatgtgaataacgagtacgcggagaagtttgagaagaagcttgcaggcctgaatggcaagaattccgaagaccagctctgcatcgaggagtttctcgagaagagtgaaaaagactggttcaatcgataccgcgacgtcaagctgggcaagtcccccttgccatctcctgctccctctgtctttcgtttcaaggttcatgaaatcggtcgctcagagaccccgccaattaatggtccaggtgcaaggcccaatactgggcaattccttctcccaaatgactatgttccccccacgggtgtgaagcgtttcatgttgatgaagctgggtgattggcctgtgtactccatcttcctcgctattgtaagttgaaaccctaccaaaaaccttcatcatagccattgacagtattattcagggccaaattctcgccttgaattcgtaccagatcacactcctgaacggtgagattggagagacggccgagaagctatacattctggcatccatctatcttgcctcttctatcatatggtggatggtcttccgtctagtcccctcagtctacgtgttgacgattcctttccttgtacgttcaagttcctctatccagcttacggggttgcaagctgactagccgcagatatacgggctcgcctttctatttgtcggtcttaccggtcacatccaaaacggcacaagtcaaacatggctacaaaatgtgggagtcggcttgtattcgtttgcgtcttcgagtggttcgattttcttcgccctcaactttggagacgaaggtatgcaccaactcttctaggaaatatggaacttatctgactttcttgttcaggtggagcgcctctgaggtcttggatttacagggccactgtcatccagggcacccagcaattgttcatcagtttcctttggtactggggtagctggatggcaactctcaatcaaaaaggtagtgagcaattcagccttgccatgaccgatccaggtgctttgctcggaatcggactcggactcgcctgttttatgtggctgttgggagccctgatcttctttggacttcctacatattaccgacaagcaccaggtcaagtgccgacattctacctatcgctcttccgtcgtcgcattattcttgtatgtctcttccagtcccccctcaagctaatcttgattctgacactgtattttgcagtggtttttctacatggtgtttatatcgaactactggctgtcggcaccgtacggacggaactggctctatctctggtccagcaagcatgcacaggtgtggcatatcgtgctccttgttctcctctttttcatctttgtctgggcggcagctctctgggtctttcacgtcttttccaagagacacgcctggtttatcccgatctttgctgtcggtcttggtgctcctcgatgggcccagatcctgtgggcgacctccaacatagccacatacatcccctgggccggtggtcccgtagccggagctatccttggtagagcgctatggctctggctaggagttttggattcccttcagggtgtcggtaagttccttctcgcggcgaataaaacgtaacaaaaactgacttacgccaatacagggtttggaatgatcctcctcgtcacaatgactcgattccatgtcaccttcacacttctagccgcgcaggtggtcggttccgttgcgactatcctcgcccgcgcgacagcaccggataagttaggccctggtgatgtcttccctgatttctcggctggggtcgcagccggcttggaaaaggcagacttctgggtgtgcctgctcttcatgctgtccatcaatgtgctctgcatcttcttctatcgcaaggaacaacttgcgaaaccttgactggcgttttcttttctttttttctgctttgcatccactcaacattgtgaggcgtagatattgtgatcagaggattaattatactataatcggttgcatttgctagggcgcgatagaccttgtaaaggtcggcccttgttttggatatgtacataatacaagtcaggtatccaaatttaatgttcatattcatattcatttggtgcttaataggcatcgatgcttctagtcctaaattaaattcattaatcaataccttgaagtggtttcccttggttggacttcccttattctgtcaagcgggcgtgtcccgatcgcgcgaaaatcaacaatatggaacggtacagcctacgccggtttaggactagtccggggaaatgacttttccgagccggtactccgtatatattagtcatctgttattcccgcttctttcattccgatcgcttattccaatggtccttcttatgggccctatgcaaataatattacataagattcaataagtaactaggatagtcatgcaaagtttaggctttaggcccatttgcccactttaatgggccgagtcgactttgggtctgcgggagacctttgattagtgctcttgccaatatccgggcccatacccatttgccttgcgataaattatgacataacagtcatgtccacaatagttggcaagcgcaagcgtgcaaggaaggcatgcataccttgccaccagcgcaagcgaaaatgcaatggggagtacccttgcggcacgtgcaccacctacgaatataactgcagatacgccgacgatgacaccaccaacactgcgggtaaaaacgaccatactccactcctggacaagcgcatcattaatgacggcgggagtactatggcgatcggtgtcaccgccgaatcgcgcagcccggacagccaatcccatggagcgagagctgccggagctgacagttcatcgtcaaagagttctgccgtcggggccggcatcttcgacgagcagaagtccagatacactggagcatcggcagccatggccttcccgcacatcctgggggtggcttttggcgccgacagccctccaaagatcaactcgttcgcgtacaactttgggatccgccccgaagaggcttccaacgcgtatggcttcctagggaaactaatttcagaagaaaatctcgccttctactcaaatgtgtacttctctgcaatgggccctatcggcgactgcttggacccaagaatttatgcccagcgatgtcgcgattattatcgtagctccggcagcaacgcggtcgccttcagcgccgtagccgctggtgtcgctgcttgcgggtcgttcctctccacaaccaggtacccgggggagtctgatctactgcagtacgctaaagctattctcgatgatcctggatctatacgcatggtaagcatcgaccatatcgtcgcgtggagcatgcggttattttatctaagggccacagcccgccctagtaatgcttgggtcgcatcgtgcactcttatgcacctttgtgaagtggttgggttacacaaagaagagaatattaaaaggatggcgtctgctgccggtgctgctgttgttgggcatgatgcggaccggctaaggcgaattttctggatctcatgggccgcacatcacatgctgtcgtatgagtacgatcgttcggctgtaacatttgggaccgtgacttgtcagcccatcatctccattccggggtccgttgccgaccagttcgtgcaaatagtccagatcatcccatcgcctaactcgccgttccagctcgaaagtcagcctccaactccgagggaggagttgttccagcgtctcacggcattgagtaaactctgtttcactcatccgttcctagtggtgacgaaggcggaccttgcgttttgtttctatcgacgcatttatcagctcaagacaggcgtgacagacgagataattcaacacgtcattgatagcggtaacgacgcagtgagagcggctgagaagctagccaaccagggtcgtctgttgtggaacgtcataggcagcgtcttccagtatgtctgtgtcttgttggccatcgacacgccggcctcctccgctcacatccctgccgcgttcaaagggttggagaatcttgccagggcaacagacacaggatcgacccgtcaggcattgtcaatagcacggcatcttctcagtctcaatatagcaaagaagcgaaaagagcttctgcagcttgaagctgtggagtcgggctacgaacccttccaggcgcagccggaacccgatgccaacgctgcttttacggacattggctggggtatggactgggatcagcttctcatcgagccatatctatctattttcggacccgacatccagctgtagtagcgcaaaggggcattgtgaaataatccactcagcggcgattcaactcattaaaccatggcgtggcattctataatggtctaggatgaaattcagtgttacatttatgtaaaattgccattgaagacatctaaacaaattcttcctgcgtttcgctcttttcctgctccgccctttctggcgtcatggactaatgccgctccacaaaacagaaaagcagagccacagctaaacccaggccagagagaccgacaccgatatacaatacgccgcgatatctttataggacatccttcccattattattgacctgcccctcgaccgtgccggcaaactgtcgactttgtgctttggatcatatgccaacgagcggctacggagtatatttattcgattcgtgctccgtgaggctagaggctgagcccctgcacaaatcaataaagctcctctttctccacatcgtgatcaactggatcatctaggccgtaggtatgcacggaggtctgttagtcgggagtggactcaacgccgcttcaatgttggtgcagcggagcgggtctaactatggcccccaatgtgcggctgctgcggccgagatgtgcgggatgaccatccttaaccccgacggtatctccctcattatggggcttggcattttaacaagtacctttggcgctaatcgccgcagttgccgcggctattccggagcggcccagaacttaccacagtgcagctgcgacggtgacggtcatgcgcgtgttgcgactcatagtgggttgatctggcctacgggttcgggggcgcaagtatctctgcgcgaatcaagttcgaaggtctggccacatcaatcccgatatgcgagctgcccggaggataaatagctgcgcggaattagcgtttcggaattatccaatccgatcgttgtaactaggctgagatggagagaatggcaacaaagtttggctctgcggcgatttcgagactgggcctgaagtgtataaatggacaggtattctctgctccatggaagatttgccagacacccaggagctcaaacggcaacagctacaagagctaccatacttcggacaccacttttgaccacaatcacaacaatcgatacacattgaatccccaattcaaaagaagattttcaacaagagcaaaaatgcctgagtacgccaagaaccagccagccggcttcaaaaatgccattgagagagtcgccattgtcggtgtaggtgtatccctccagcagcagccatgcacaaaaattaacaaacgtccttaggccggaggcactgttggatcccacctcgttgccgctctccttaaaaccggaaaacacacggttacggctctctcccgcagagatagtagcaacaaactccccgagggcgtcctcgtcgccccagttgactattccaacgaggccactattgtcgctgccctcaagggccaggaattcttcatcatcacagtatcccccactgcgccccgcgacacccacagcaagctcgtccgggcggccgccaaggctggtgttccctacatcatgcctaacgggtacgctggcgacattgaacacactaaactcggagaggatatcatgctcggtcccgttgctcaggctgccagggacgagattgagagcctcggtatgaagtggatcaccgtgtgctgtgggttctggtacgattacagcttagcggggggtgaggcgcgcttcgggttcgactttgacaagcggtctctgacgatctatgatgacggcaccaccaagaactcggtatcgaccttgtcgcaggttgggcgcgctgtggccaaagtgctgagtttcaaggtgcttcctgaggaccaaaacgacaagagccttactgtgtcgcgatggcttaataaacctgtgtatattaagagcttcgtgatcaaccagaccgagatgtttgagagcgtcaagcgcgtcacaggcactagtgacgctgactggactatcactcatgaggatagtaagaagcgatacgcagatggactgacaatggtcaagactggtaacatggctggctttggtaagctgctttacgcaagggcatttttcccagatgatccgggtgattgctcggccaaggcacagaatgagctgcttggtctgccggaggagagcctggatgaggctactcgagctggggttgatatggtcaaggaacttcagcttcgtgttgagcgtatggcgtcatagaaaatagcatctgcagggggataccattgcaatgcaaacttgacatgaatagaatagaaaagggacggagaatgaaaatgaccctgataaatttaggggattgttataccccctggtttaattctactttacagactccgtagtcaaaaagcccctacattttgatcataaaaaacgtgtatttcatctcatacctacatgtttgaatcccttgatgatgatggagcagtttttggagcagattttgaagtaattgttgaagtagttggtgtgataaaagtaacttgattttgttgatggtttatatacaaattgtgggtatctaccgtcctcaagttggtagggagttcaatactaagccggtgtggagggcggtatgctgaatcaggcagttggggggggggtcgaattagcaattaggggggtccctttaacagtcccctaactataaaatcaccctgaggcataaatagcaacgcagacaccttcaaccaccttctcttcttcccatcccatggcaattccgaagccaagaggtgaactcatggagcgaagatcaatatgagcttcgtcaatttgctgtacacaatctgcttattactgccgaccgatttaaagtgggacagtatccagccagcatcatctcaatttgcatatcggtgaggctatcacgattcaccgggtagcatcggcttccggggcctcttcagttaagagaatctcttgtttactttttcctcttctctatctctctgccatctcagatactcatcacatgggtttcaccaaatgatcaacccaggatgactcttccaacttcctcctacaatcctatcatctttttacggcaagtcttctggtggaggcatagacccgtacccatttgagggttcatgaagcgggtaaatgaaagaaaacccaactgtaagtgcagtgtcgtctattaccagtctcttttgactacggagttttacaatactaatgatgatactctgtatagggcagatgatctcgtggcgatacggaataagtggctcgctgcgctacataccgcaagctcttgcaggtcaagatctacggaaccaacaatgatttaaaacgatcattaaccacaattttaggtctcgagatattcatcacgagagagtctatgtgaagcttggtggcattgagatcaccaatctttcacatttgatacacttcgagccggctgaatacaaagcaattgtcgacgatgatctggtagatcccgatggtgagatacaggtcttacttgaagtcaaggctaggcatctggtatcgacttcatcaagagaagtcctgatgcaacaggggcttgaaatgctggcatgggttgctgaaactctgggcattgaagggtcagagggaccaagagtcccactgagcgactcaccaatcaagaggtaggttttatcatgatcattatactaatgcttaagaaacatcgctaatcagttgcctatagatgggtgatgttagcccaatacgcgacaagcgtatatttcatcgtcgctgatctccgtgaagggtacattgagtactcgatgacaggcgagcgctcagagaacccccttgacaagaaggcatttctcaaaatggagatattgggacctttcagcatctattctgcggaagagatgcggatgttcgggtttcttgttgtcgccctgacagttgtccagcaccgggattggaagaagggtaaggaggtttagatagtaaatgaaaagcatattcttcctcacatagactcccggactccctaatatgtgtgagtaaaccctctttggaaaaacccatcagctagcatacacgcttccgcagtcgaggcaagaaatgcatcggctcctgggagactcccgcagataaagctgtctacgtataagtgtttgagaacagaacagaataggagaagccggggaatatattgtagcgagagcaaggaagggaactaaaacgcgaagacgtagtagacaccacgagcaaacttctactttgtgtcgcgtgaagggcagttcagcccttctcaagcagcaacttgggatctccgacggaagttttggatatgagcgtgctcttcgctgaaaaggtccgggccatattcaaatgctctatgtaggctagtccgtttcaaccttgaaacaaagtatctgcgttctgatgacacttccatgacctaactcggagagcatcatctcttactatatatcatgctgttgggggttacttgcgcaccgctatgcaagcgttagaaatcccccttattgaaatattatatatacagccatgacacgccttggacaagaaaaacgaacatggggctagctgaagtagtccaaggcggtgtgcccaactatttagggcacatctggtggcagctgaagcctgagacaggtggatgccgtgcaaaagtccgcccactcttaagtcagatgccgctctagtttgtccaatagaaattcgtccatcgctgatttcactgaacttgtccacctttgcgaaaatcatcgtgagagcttgaatcgagatctctagattgctcaagtatacaaagtatggagttaatagaggaattaagaatcgaaagtccacgccaggaacaataataagcaccgaagggaccgtggacccctaagattgtgaagctccacagtgacgtcaatggattttccttgttaatttcctttttcaagggcgtcgaacgccattttaggggtttaaatagatcgaatggcgcagcatttaatttccgagccttttcctgctattatataaacacccccaggtcgtttctgccgacggttgagtggtttatttagggttgatctagaattgtcctaccttttacaatctatacaatgaggtacattctggcacatgccctcgtacaggcctcacttctctcaattacctccgcctccccggctccaactgctttcgccaatatcgctccacccgatcccgtcgttacaccttccccggtcgagcatatcccttctcccattgttggccgaaacatcttgagcgacgttgattctgatatcaaaaatgtcctttcggggcttgggtctgatctacctacatgggtcgcatctggagtgcccaacttcttccaggggttcccgactaaagacgcagttgcgagctccctcggattggacagctcagacttggcggcattaccaaccaatgtgttgaacatcgacccttatgcgaactggaccaagtcgggctggaacgttcgcttccacggaaacgtttacaagcagccgaacacatctgtctccaagttgaacgatttagccgatatcttcctcgtcaacactaaaatcgcggaccttcctcaatcccagcaggtccaggcacgaaatctgactgccgagatctttgtcgtgcagcagccacatgttgcggtgaacaagatccacatcaagcctgcggttagtcagggatccagcggacagccaggcggcggcggatcatccaacacatcaggcggtacacaagacatcaccctaccttacaacacaacagccgaaggtgacttcgacacctttgtgcagattgaaagcaatggtcttactgcgggaaatgaaacctcggcaattcagagactggacactcatgtcgagggcgcaagtatcggaaatgctaccgcctatcttgtgcctccaaccggactcaccgtgatttctgacattgacgatattctgcgtgtcactaagatttacgaaccggcgcaaggactactcaattcgttcgctcgtccattcacggcttggcagaacatgccggatatttaccgcaactggtccatcagcctccccgatacgcatttccactatcttgtaaggctcctctggctccccttttcttaataaaaatactaatagtcattccagaccaccacccccgagcaagttactagaaactacatgcagttcatctacaccacctaccccggcggctccttcgacacccgtccgctcaactttagcgacgtgtctgccactctgtcgatccgcatgttcttattgcaaaagattttcgaaaccttcccggagcgcaaattcgtcctggtcgcagacaccagcaacagcgacgtcatgcgcgattacccgaaactggccaccgaattcccgtcacaagtccaatgtattttccttcgcaacacttcggcaaccgattcgggcgacaagttcccctacgacacgtccggattcaagggcctcaagcagtcaaagtatatgttcttcgtgaacgcggatgacctcaccaacctggacatcgcaaacggacactgttacaatcagtcggttgcacagaacctgacgttcagctaccagggattgccatttggactgggggatactccaactgctgtcaacgcgtcagcgaatcaaactggagcggctagcggactcttaaccaaggagtcggctggtgcgcagggcttcatgacattgatcgcagcgatgtttacggccgcctttatggttttatagaatcttctagttacgagtgctatgaactaaatggacaatttgatacaagtctttattttttttaatcccatatatttcagcggatcgcagacagcagctagctcttccagcgtcgcaactccagccaaagaaggaatctcctcaagaacctcaagcagactccgatttcggtcgagggcagacttacaagcctcataaacgagatcatgagcgccttgtcgtcccaaatgcggtgccagtcccataatcacagcatcaccgacaatcaaccccttggtggaatacagattgcgtttcatcgagtcaaccttaaccaccaatcccccgagggcgaaattcgtctggtgcaaagcgcccaccgcagtcacgaaaacatcgggaatagccacccattccaaataccacggtccagatgcacgctcaaagataaccattctatctaatccgagagacgcattggcacgcaaccagaccacctcactggagataggattacgcttccggggcatcgtagactaagcatttctgtgaggtacgaagggctccgagacctcgtcgaactcattggaagacatgatcattacgtccaatgcaactttccccaatgtgccacccaccagagccaggaagttgaggatctccactatgttgtcccgcgcaacatgccaagtgatatcaggattctttagcccaagctcagcggcaagctgcttacgaacccggagccctgtatcatctgcaccaaatacagcgatcgtacccgctgcaccgccgaactggacaagaagacaccgctgctcgatctcctcgatgtagatagctccgctgctgtagatcgatgaatacatcatatttacttcccctgagttatcagtatcacaagcatagtcttttactaggccttctcggccaaaacgtcatcaataccatatgaaattttcagaaaaaatggggaaaacgtgattggatagccaaattctacatgacctgtttggaaggcttattcttacgttcctctctagtctctcttccagatatgatgaccgaataatataactattttaccttcctggaagatggtctctcgtacggggaattccaccgagaagggtttgtatacattttggtcttcataaacctgttactaatagtcttctaggattccccatggcggatgggtagtagaccggttagttaatgggggtatcttatatgtctcaaatgctaacttgcagtacagtaatcaccactgccgatatttccccgactttgaatgtgaaaataccgagaagcgaatttcctctagatttactgagctgccatgagcacaagggccaccagcgctcaatagtcgggttctgaaaccaggagaaatgtggcgataaacggccttcctcgatggagctctttgcgattgctgcattaacccacgaagaaatggcccgggttgataaaaggttgtataagaatctgttggacgagtgctactttactttcccggtttgtttttccttcttgggtatcgttagtcttttactgatatatcttagcatttagtatttctgatggacaaatttggcggatgccgtatgttgcaatcttattttaatggcaagcttcatgttcaattctcggagatcctagatctaggacatatgattgccgtgcctgcttaccggcaaaaatactttgatatggttgacagaaaagactttctggagaagttgaacctgcttctaaagtgggcatggcccattccacaaggaaacaccgttgcaaatgttccaaggaattatggcaattgatttgctgagatgattttgcttgatattctggtttgcttatcttcaaggttaatgttgctgctctcagaaaatgaacaccctgttaagaattcttctctcttgatggcgttcacattacacctgttaccttagtatacggaggcttatagcctccatgggtgacttatttactatcggctgatactactttttcgctttctctctgccttcaattgatatacatattactcatggataatagccgcagatccactaagccatggaatggtatttagctttgccaattaattgatactaagatgtagatacaaggccgaagcaaaaacaagatggcccggaaatggtatctgggtgcgggccatcatcgcaatgagcttcccgatcatgtttcacatgcaatgatatgaagctaatctctctctttatactgccgagcagcataacgaacatattgaggagcaacaatgcgtcggaatgcctttccatatcgaaggaagacaacgaagaccatcaggatagcaattgcaatcaccaaaatagtgatgaaggtatttttgagaccaaccttcgccacccagggtgataacgcgaagataaacgccgtgctgaaactattgcgcgtgagtgttacacccactagtgcatctccaacaatctgaattggtgttagaatatgctctgaaagaatcatgggttcagaatggacttacatctttgtacgagtcagttaagtaggtgatggtgagagtgttgataggggtgacaccgatgttatataatgccagtccgacggcaatgacaggccatggccggttgtcattcagcccgatagcaaatagaagtgcgcctgcgattataaatgggagaaagggaatcatacaccagagacgcatctcggggtcgaagatgccgtttcgccggcgagagagaaatagaatccaccaatcactcagtgggccaacaatgagcgcaccgatagagacgccaatcattctcggtaggctcatgaggccaacctcataggaagagaagttatagggagccttgggcagataggccgacatagtagttgacatgacatctcccagagccaccaagatgccataaacaagtgccgtccatgcgatggctggaatagtcgtgagaacaatgagaggttgatacatgtggcgaaagaaggactcgttcttggtattggatgaagaagtggtggttgttaaggctagtctttgccaatacgtcttcatgggaatattcgggttgattgtgacagcagtgatgttgggttcatctgctttgatcgagctgagatctgcgaatccttgctccgcatatatttccttcattctggcggacgaaagcttctccaaatcgtctttgttgcggtcttcttcttgagggttcggtgcaatggaccggtcttcgttcgtggtatccagctgcacatctggagtggcgggagaagccggcgggcaatacttggtctcttcgtatccgaagccgacaacaaacattgtcacaccgaagatgatagtattcagccaccagatccacctccaacccagaccactggcaacaaacccggcaattagaatacccaggtagctagagagaagccacgtccagacatagagagcattcattcttcctcgttggtgcacgaagaaaagatccgcaatggtcatttgcacgatgacctctgccagactcccgaagaagcattgtatgacgttgatcgccatgaggtctcccacggtttgcatcttagcagaccaaatgcagactccgaattgaacgatcgtgctgaacagatacaagggtcgacgtccaaacttgagcgcaaatggaatcagaatgacggagccgactcctaaagcagcacagccagcagcatagctgtcatttaatatctcgctggtgaaaccgagctctgtctccatgggtccccatgttggtgtattggcgttgataaactcggcgaccatagcgacatagaagcagactagtcccatgttcaaacatttccgccatggggcccaattgaggggatcgttgggatcgtcggatggtcgtggttgtagaataatagtttttccatcggatgcagttgcatctgcaaggtgtaatgtaccgggaggccacatggaattgttgccagtaccgctattcggaagcgtcgaagacatattgagatcgaagatgatagaccgcagaactggatgagttgtgaggtctgaagggtgcacatatgtttgccggaatcaaaagttgggcattcttggaatataagaagtcgggtgttggacagtggccatggatgaggccagagagcagaccttctatagcagacagaatctacattactcaattactcatttgtgaggttatcacacaaatccttatctgtttgaagtggagtgctataaaccagtccaattggtggaatgttccgggagtggcagggttaaacgtgtgaactaagatggctgtggagcaaaaacgagggtttccccttttaattggcgtaaagtcccggttcaccccactggagaagtcgattaagtgaattaagatagccgtggagcgaaaaagtggtggaaagtcccagttatcgcagagaacaaaatgcggagtggcgaatgagggcccaccaactcaaccgttctgtatgtagtcagatgtaactttccgagcaagacaaggcggcttatcgcttgactcggaatgctaacgcgccatgtgtcagttcaatggcgagacaggagacaggtggggggagagcggggggaagcggacacgtataaatttatttcgaatctccaaaaattcatcgctcacatctactagataccgttcggatctgcattgggttgttcgtttattttcttcggataaccgacaaaatgggacaagatgcattcgaaaactttggttttccgaaacggaccaactattccatttcgcactggctacaatcggtgcagggcgatcctcttctggatcatcgaacaacaccagagttgcctgcgtctgcagacatagtgatcatcggatctggcgtgagtgtcttccgatgttcctgtaacttgtcggaagggttgctaagagctgaaatagatgtctgggacaataatcgccaaaaacatcgtggaaacctggcccgaaaagaaagtggtcgttattgaggcccgactattctgctccggtgctactggtagaaatgctggtcactgcaagcctgaccagtggcgaggcttcataggctatgagaaacaatttggtactcagcaggccctgaaggtatcaaattatcaaattctccggttatgcctccatatacgctaacgtagacctgcagattctgcaaaacgaacaacagacatggtccgaagtcgtacaatacataaaggagaacagtgtcgaatgcgaacattggagtggtgatacactggatgttccagttaccccccaggccgcggagaatgcaaagaagatctttgagcgctacaaggcggcgggcggcaacgttgaccacatcaaggttacaaacgaccctaaaaaagcagcagaggttcgcaaaagcgatgcatcttcaattgacccggctgacaggaatccagatatcgcaaatcaaaaccgcacaagcatgttatgcgtggccggcatcgacgctacacccctggaaacttgcggcgcacgttatgcgtgacaatatcaagaaaggggtgaacctccaaacaaagactcaagccaccagtgtcgtccattctggggaagatcaacacaagtgggtcgtcaaaaccgaacgaggcgatatcaagtgttccgaagttgtccatgcaaccaatgcttatagttctgcactcgaaccgtctctgcgggggctcatcacgccatgtcctcacatttgcaacaaggttattccacccaaggctgatgcaggctttgaaggcttcaagggctcttatggtgttctactcccccaagacgccctgatcaccatcaatcctcgttttaatggaggcggtggggttcttttcggcggcagcaacccaggtcaagatgagtttatggagtggctagagaaaaacccgcatcggtacattgacgatggtctgactggatttgactcggtcacgaaggctatccaggaattcgcagtagaaggattcgaaggatggccctccgatgccctgaagcagggggagacttataaggaggcctggagcggcatccttggacttgtaagtgcttcgcttgatatgaaaatcaaatatgggctaatattagatcagagcgaagacggcctgcctttcgtcggacaattacctgcacttccaggccagtggatttgtgctgggcaccacggacagtaagtccatacatgtctcccacgctgccagaatggctgtgaaccatgctacgctgacacttacaactcattagtggcatggcacgtatctttaccgtagcatccggcttggtcaagttgatgaatggaagctcttggactgatacgcggctgcccgaggttttccaaatcacggcggcaagaaccgaacggctgaaagagcgcgtgaagatatcacctgttcgtgctcgtatctgagtctccaagcaaaatattgggagtgtggtatggcaaggtcgagtttagtgttagtatgtatttttgactggtacgttcccatggggcttggacttgctaggaccgtgtaaaaaaattcttcatatgatatagaattccatacctcctagatatctgcgcacaataatgctctaccaaaaacttccgccatttgtattatttgctctgatacgcccgaggtgcggcacatttacgtcatagtccaagaatgatgacacatcatcaggtgatttcatcccaaactgcacgtgacccatacaaatccccacaagttctgttgagattcagttaactaactaattaactactaaaaataccatttcttgtataagaaggataaagaagaaacccctacattaaataatttcctaatccgcacattgcgggcacaagtcacgttacttaaccttgtaatctcccaactccacctacaattggggaaagcgtagaaatcacggcaatgcggggatttataagaatcagtggaatgggactagttcactcgttaccaatcacttatttgggtgttttttgtttccatttcggattttcctttggcaaattgatgagccaatcagaagacttggttccatcaatcttgcgagtgataagctctgaaaatgtactgggaaaagagtctccgtgctatctctcatcattctcactacgtccagccttgctcccagaacgtgaccacactgcaatatcgaggccgattgaaaaattgatgggctattttccattgtattctgcttcatgtttcaacctggacataataagagacagtcatcccgaggcactccatcgggaagcaggacaccgctcgcgtgcgtgaaatgcaaagaaaagaaattgaaggtaggattaaaaacctcaagttaagctcagtctcctaatccaataataaagtgtgacaatagggtctcaggatgtattaactgtctccgtgctggatctggtcggtatttcttttgccactcggcttcttccattgatgtgcgggtttgtgatgttaatctgacaccgaatgacagtctgtctcgtggaagatccagtaacgagggcatatcggccgcgaaactacattgaaaccttagagaaacgggtggcatttctcgagagtcttctgaggcaatgtcgtccagatcttgccaataacgacccgctcagacaatatacacttccaccagaagttcagccaaattcagttcccctagcgcaacacatcgagacacctgatcaacggcacggtgatcaatcaacctcatccagagccaaaagtgatgtcgaggaagatgacggtgttgacaagctgtcatcaaaggtcggcctactaagcctcaatgcagctggagcagagcctcaatatttggggtcatcttcgatttttgctttctcacgcctgatcaactcatcccttcgccaagtggtttcctctgactttcccacggctaacgtgcttgattggactgagaaccgctcttccgtgctaccatcaccgtgcttattgcctgcttacgaatcggctgtcaaacttagcgacatttatttccagaatgttaatacacattaccccttcttacacgagccgacctttagggcgtgggagtcgatgctactgaatgagtcgacggaattgggaattcttcttcccaattctgtctcgctgtttttcttgaatatggtaagagagacacggcctcatgctcattgaaatcatactcacagtgctaggtgtatgctgttggcgctttgcttttacccagtctcggattctcagcagaggtaagcagacatttcgattgacttacggaaagctgactggctcttagcgtttatacacgtcagcactaatgtatatcgatgatatcctggcctatgataatctagaagcaatacaagccatcctgtgctgcgcaatttactcacttaggtcatccactggtacttcgcactggtatggacagcatgaatacggggaaatgatgtttcgctgatggcatataggaaactcgctggtctagcactccgtcagtgtattgatctgggttatcatcggaatacaaagcaccttgcagcgcctaaagatctacttcaggtagagttacgtaagagggtattctggtgtgcctatgtcattgagactcaagctgccgtcatgctgggccgacctcttggtatcccttaccaggaggtcgatgttgaagtatgtttgaaattactagcccaaagacacgcattacgtgttgttctaatgtactcttgtgtagtatccgattgacatcgatgattcatgcatcaatgaaactggtcttgtgggcacgccacggagctccccaactgatgcaccaaccaatatgacgagagcgatccatacatttcgaattcgacgtcttttgaatcgaattcacacttatatttactcaaaagccgacccacgctactcaagaaagcacgaccagcagactgatgtgaagaatatacgtgccgagatcgagaagtggcgctccgaaattccacccacagcttttcaccccggtgaagagcttgtcttgtttacgactgcagattggtatgatctggaatacaactatacgatcctacagctttaccgagcccaaatcgtcgatcaccgggtggagactacagatgaggttttccttgattgtctgggcgctgcagagaacatttgccgaagctatcggcatcactttttaggaaagccaacgagatgtacctgggcagcacttcacgagcttttccttgcaggattgacatatcttcactgcctttggacatcacctgccgcacgacaggcagctggccacgggcaagcaagcagcacatgcaatgactgcacaatcgctttagtggtcatggctgaacgatgggatgttgctgcacccttccgtgagatatttgtggcgctcgctagccgaacaatgttgatgatgagtgtcaaggcggatgaaaatgtatctaaaaatgtggcttcggctgattccggtaattgggctgaagaggacttgacggagtggatgagaattgtggccgatgccggtgtgcttgagggctttaacggacttttgactggtttacccagcgaatgactctaccttcagtctatgcttccgaaggacatgataaaacgcgcgttgtgcgggttaagcgccgggaagtggggtccaggaaagagacttagggttggaggttgctagcggtccttgctagctagagacaagtgctcataacctaatggcgtatctgactacgttgtgcctgaaaaggggaaaacaactattgtcgattcgctaagataaaagtggacaagggagagagagagaggaagagggagccgaactatctgatggtgatctgggtccacatgggtgaccgccttccggtcacccaacatcccccctacagatctcatatctcctgttttgaaaatgatgatctagaaatgtcgtaatcgtggtagtcgtaaaaaaaccccaaattttcctttgaattaagtcatcccgataagcttcaagaaagctcggaattgctctttgggaagcgccttcgtaaacccgtccgccgcgttctgctttgtgtcaaccctcaggatgtttatgtgtccttgggccacggcgtccttcacgaagaaccatcggagtgccagccatctggtagcagacttgcctcccttctttgtcagtagcaactgtgaattgatgttgtcggtgtagataactgtgggatcgggtcttggcaggctcagtgagtctgcaaccttagcaagccacatagcatcccgggccggctggtcgagcgcacaccattctgctattgttgtggagttcgctgtgatcgtctgctttttagtagaccaagctactgggactcccgcaaagaaccagatacatccttcggttgatttggagtctgtccagtctgcgtgtgatgcgtctgtgaatgctatgaattgtagttcgtccgactttccaaagatcagtcctgtcttagggttgtgtctgaggtacttgacgacgtgtctcattgcctcgagatcagaaaaagtcggtgttgctagtctgtgttgtaggcgtgtgacggcgaatctgatgtctggtcttgtcttgatggcaagccagttgagcatccctactactgtctggtagtgttcgaagttctcgtcgtcgagtaggttagagtcaatatcttctgggttagactctctccatcctggtggtagtggtgtttctttcgttcccgcagtatctgtaatgcgtagaatcttttgtacgtaggcttcttgagacatgatgatcgtcccagcgttgtaatctctgtcgagtgcgcagttaagatactgctttggttctcccaggtctttcatgtcataatgtttcttgagttgcttcacgaccgagtctatctctccggaggtgggtgcggcaatgataaagtcatcgacatggatcatcatgattgttagatccgcgcagttctttcccatcttgacgtagacacacgggtcgtcctcgaggggtctgaagccggtttgtcgaagcttacagtccatctcctcgttccagaggaaggcagagtctcgtaggccgaaaagagcctggttgagtgtacatacccattgctttgaatttccttctgcgtctgcaaactcgaaacccgttggctgtctcatgtataccgtctccgcatcttttcttgatgcgttaaggtaagccgctgtgaaatccacttgacgccattcgaggccgtagactgcgatgagtgtcaagacaattttgatcatcgtttccgatacaaccggtgcgtaagactcgctcgagtcatcgcttttctcctggaagttgccgcagacaacccatcttgccttgaagccgtagacttcatctctcgtgttcgtcttaacggtaaaacgccattgtcctggaaggactttcgccttcggtggttttaggatcaacgtccatgttctcttcgcggcgaggtcatcaagctgtttttccattgcttccttccattcgttccagaaaggtgatttttgtgcttgtttaaaacttgatggtaggtcgacgtccttgtcgtgaagaggttttccgttgtacatgaaaggtgcgtcaatgtctacctgatcggagttgtctggcgaaagtttctttgcgtttccttcttgaggaggtttgtgtttttccgcacgcttgacatccctcttttgcttctcatattcgacgtttaggagtttttgtttaggatcctgatatctctctggtgggataccgatgttgctcctttttgatctcctgaccgaaggttcttgaatttgagttggtgctgctgttacaggttctgcggtaggtacgataggagtaatcttctcctgtgtctgcgtcagttgcgcagcgtgccgaggcgcttcataagtgtcctgcgttgatgtttgttgcgtagctatctgttgttcactgcgttctggagtctgttgagttggtgaagagaaaggatactggtactctgtccttgtctgttctggggacggagtgtcttcccttggagttgactctcgtggggagctggtttccctgatcaagtcctgttcaatcgagtctgcgtactggtgtacttccagcatgtccatctcttctgcgttgattctagctgtgagttcctcaagtcttctctggaagttggctttcctctctgctagcttttctgtcattgtaatttgctccgtctgaggggttgcattctcactgtgaacagtctgtgtctcctcttggattggagtaagagtctggttgactctttgcgctgttaactgttctgtgtttttgggaattggtgtccctctctgaagtctcccaaggatcgatcttgtgtgccttggtgcagggagtagcctctgtcgacgaggcattaccggggtctctggtatggttgaaacgctgccttgaattgtgggcaagtgaattgttgacggggttactggatcctgtctgtagactgttacaatctctgtccttggttcggttctggctgcgtcgatcagcgggatggaaatttcgtttgtgtcgtcatctcctgggggtttcgatggctttggcgctaccggtactcctccctcctgatcttcgtcccctggttgaggaaagctgacgtccctcgagattgtaatcttcctagtttccggattccagatttttagaatatgtccgttatccccctcataacccatgaggtgtcctttccaagatcttggagcggctttgcgtgcctgtactctcttctccttcggaatatgaacgtagacggttgttccccatggtctgaggtgcttcagtgacggatctgggttgtcgattccgagttctgtgcgccagtgtttgagtggcgatgtttgagactttgggttggttaatctgttgatggtgtagattgcagtttctactgcgtagggccacagctcctcaggtagcttagtatcgatgatcatcgttctctgaatgtcgttgacgtatccgccgaagcgttctaccgcgccgttgggctctgccgtgtagggtggtgtaacttcgaaagtcattcccttttttgtgccccaagtgatgaagttcttaaattctgttccaccatcgagtctccatattccggggtagcgcccagttcggagtttgattttttcgcaaaatgcttgaagcttgacaaatgcttcacctttgttcgtgagagtcggcccctcgagatatcttgttgcgtcgtcgaggataggcatccagtacttttcaccgttcgggccctcaggtttcataggctgcgtgtctacatgaaatttccatgccacgtcctgaacccgaaattgcggctcacgagaaatctgtttcttggatttaccttgaaaacatgcttcacagtcgaagtattctgttccatactgttcttcgtcgtcaagctcttgtgcttgtttcagcgttgaagtaagtttggcttttccagcgtgtccaaagcgtcgatgcgcctcaaaggcagaaattttattgactaatcctgtttcttcgtcactgtccgacccgtaggatgaatcttcttcgtgtgaatcgtcttctttaggaccgatgaggtacggaaccccgagtgatgtgtttgcaactccaacggtttttccagtgccgtctgtaagtcgcttagttcttgtgtcatacgagatatcctgttcttccaggagtttctgcatgccgaacaatttgccgtgaccccttgggctgtagtagccttttgtcaggaaggtgtatgttgttccgtcttcgagacctgctttgacaaggacctctccgtgtccttcagttaccactctgttgccggagtagtcccggtaggcgtatgccgattccgggctgtcctcctggtatgtgtagaaatcttcgaagtcgtgggtgagtgttttgtctgatccggtgtcaatcagccagctgttgaaactatctgtgtgacgagctgttgccgttatggccatattgcttcgcccctcgcttcgcagtgcgatcgagtaattccatacgtgtgggctgtgtgtccagtgtgcgggtggatcttctgacagataggaacacttttgagctttgtgtggcccgaaaccgcagtaggcacacatcccgctctcatccctttgtgttccttccttcttttccttgacatactcatggatatctttaccaggaggtggttggttgcgaagggtcttcttcttcttgggttcgttggatgtacttgagtcatccttcgaagatttgttgtcttggcttgaggaggcttcgctgttacctcctttgccgcccctcttaccacctcgtcctccgcgtcctccgccgcggttgttaccccgtcccctcgaggactgggctgcgttagcagtcccttctctgtcggaaactgcctggaggctcttgcaatattggtccatcttttcgagtgtgattttcttaggttcgatattactaatctcctcgatgatgaattgaaccttggatatttctttatccaattgccgtagaacttgtgatagtgcgtgaaaagggtgtggttgaattttgaatcgcgaaagaacgtggtattgtttctggtattccgcaatgaattccttcgcagtgttgaagtccgctcgtttcatttcgtcgaacttttttgtttcgtttagcgcattttcggccttgtcagagccttgcaccattaacatgatttcatcgaacattgtgtcggcgaattccgggaggtacgagagattctggattcgttcttggagtgtatcgtcaacctgaacgtacagccagctagccactgtgcgtgaccagtactcccatctgtcaaatttcgggtcacccacagtggggcgaggcatgctgctgtcaatgacatattccagtctcaatggcgcgagagcgaatttcacagggatcgcccatccacgaggatttctggaattgtactcgagtgctttgactttctgcattttcgcagccgagatgtcaggtaagttagtggcctgattcttctcgttgtatccgttacccgatgacattgtgttggcctggggttgagaggtgtttcctatctcccgagacgcgttgttattgcctgatggcaaaaattgtgactgattattcgggttgtcatccccagagtcgacaccgctatcagccatgctgagagctggtttgccaattctgttgttgattcctttggacatcacctgccgcacgacaggcagctggccacgggcaagcaagcagcacatgcaatgactgcacaatcgctttagtggtcatggctgaacgatgggatgttgctgcacccttccgtgagatatttgtggcgctcgctagccgaacaatgttgatgatgagtgtcaaggcggatgaaaatgtatctaaaaatgtggcttcggctgattccggtaattgggctgaagaggacttgacggagtggatgagaattgtggccgatgccggtgtgcttgagggctttaacggacttttgactggtttacccagcgaatgactctaccttcagtctatgcttccgaaggacatgataatggcgtatctgactacgttgtacctgaaaagggaaaacaactagtgtagattcgctaagatctaaatggacgagggagagggagagaggaagagggagtggaactatctgatgatctgaacccacatgggtgaccgccttccggtcacccaacacatgagcctcattttgtatggttgctggaatttaactacagcccaagttatcaaataggtttatgcgaaatggtcataatgatatctctaaaatacggattgttgtgacgcccccaaacagagacacgacgatgcaataaccactatgtgacatgaaacatttcgaaagttgtttggaaacgcgcagattcttcgctgtgattgacatgtgatcatctgcctcaactgaacgtcccattagcaggcccaaaatacccgacagctggcatcgacttgtatggtacaccctgggcgtcggcagtattcaagtacacgttattcccccaccagtcagggaaagtggcaccagggtacgagatgcaaaagaaaataacaatgccactgagggcaagacctgtatcaagggcagctgccaagatataattgtacttggtccaccaagcaaagaatcggcgtttaataaagtgattgaaggcaaagttgaccagtgcccagctggaatagttaattccggtcgctaaaaagcatttagttagcttttgaaataaagaggcactggcaagttgcgggacataccaggtgggacgttgtaagttccgacgaaaatgagaggccagttaatatacttccaaaactggcgtctagtataacggtagaggaggaaagtcacaactggagcgacagcaccgatccagaagaagtgcaacagaggggaatagatcttgcccacggagtaaagccgacggggcccaacaagaccccaaataacagatgaagaatagacagtccgaccatttggacaggaaaacccatccgtctggccagattcgcaaatatccgaaatattaccaagcatccaaagtgtaacgccggcctgtgtgagtgcgcccaggatagttgccacaaactgcgctacaaagcaggtacgtggcggcactttcagataatgagccaatttcatatccatggagaagtaaacaccctgtcccacgacatccgtggaaatgatcttgaaaatcatattggcgagtggctttccttcgaacatatatccaccaatgaactcggccagaacattcagctgattcgcatccacgttcgtaatgccctgtacgataccgcagggaaccatgtatacaaccgggatgatcaaggctagaaagactccgtaaacgggaagcttagtctcatagacttcgaccatcgcgatggacattgccatgataaccacgataatgccagcgtaccagtaccacggggtccgccggtacgaggcacggatgagccgagcatgaatatcgagcttattccggcctttgagagcagcccacaggtcgcgactatgccagagggcgatgtgcgagaggactgaggttatggcagcaaatgaaagtccgtatacaaaggcaaacgttgcgctcaggtatggaggcgagtacttttggtaagccactgtatctagagtattatccgcagaaatgactcgagccgtgtcgtagatggcgcccgtgttatcgtacacgtcggctgtcatgagtgggagataagctgtgaaccaggtattggtgtagtaaagggcgggtgtgacaatccagtagaagaacgcgaagccagcaaagacattcaacgcagcccatgatggtgataggagcgggttggtgttgtaggcaatctggctccagtcgaaggtaattggacttagaccgagacctgtctgcatgccgaagagatggttgacgatgacgttcttcggtgcgatccagcagacccaggtgaaataggataacgcagtgaatataagaccggggaaaaaataccagacaaaggcaccggtcataacgtacatgaagaatcggagacgggttatgcgccatccatctgcgatcgagttcgctcgcgaatgcaacgtttctagcatagcacagttggataatacacctggccagacgatgcgagccggctcgacgagccatggagctgcgagacccgcgacgccaaacccaagaagttgtgcgacgagaacaatgagcacgtagaagccgggcttgagattgaaattgtagaagttcttgctggcagcctggataatgtttgtcgcgtccgctgaagcatacccgaaggacacattgctcataatcacgataagcgcgtgctctttgatattaaacgacctgtctgggttgacaacgaatgtgcccaaaggcccgagtcggatggatgtgagaggaagagttttggccaggaacaccccgatcggataggcaagtagctctgctactagggccacaatatgaaccgacggatagcgcagcgaaaagaactgattgataccagatccgagcatagtgaaaacaatgcctaggagccacatccgcaccgtattgactggcatgctagggtcatccgtctcggggacgacagccctaactgtggtcactgttagtcaatcgacatatatatcaacagtgagctgggtactcaccttcagggaatggagagcggtgcgactcatagctgaactcttcatttgtattctcggagtccttttccagattgatttggtctgagtggccttcgactacctcttcgtcgactccgacgagagcgggtttgattgtgtcggaatctaactttttggaatacatggtagaaaagtttgcgcagtctcagcgcttttgcgaaagaaaacaaatggaatacagtgagacacggcgccttttctaggctgattaaattggccatggcggggacgaatttagtccgacgcgtactgaggggaaacagagataaggcattctgacggttggctttccggtggagagagtgggtttagcttaacttgacttaccttagcttcagatagtggactgacccctcaaaaactgtcctatgaacaaagccactagtggttagcctacattagtttgctttcaagttgccgacgaaagatagcgatggcaagcgagataagaagatgaccaggattgagtctgtggccgagcgcaaagccctagagaggcttagtccgagacaaggctcgagaactagaaagtaaaccggtttatggcaaagactccaggccggcagtgttatcattcagtaattcttgtgcaacgaagcacatgttttttaccctttctttaccatgcaatggacattcaacctcgtatccagaggtttcggagtccgactaggactccaaacatgatacgccaagcttcagccgcgggccaagtccaatcaagctttgcactgagtaagctccgttcaaaggcaccaaagccaattgacgacctcaaattcattttcttctgtatgaatattcccttgcggcaactcgagacaccattgtagtgtgtctcgacatatcagatccatcctttgaggaaggatatcgacagcacacttcacaatgatatcccaattactcctcgctatggcagattaaacaaaactgctgatttggcctcgataaaagctgttatttatatctggtctcgtcccatctgcgatttatctatagttaattatgagtttttactccgtggtgtacgttgtagtacgcattgggtgattctggccatgaagtcactacatggctatgtacaaatgctatgagtctagtgttcaaaggccattaattgtactcaatggtgtatcaccaaggctcggctgagcggcctatgcggtcttcgtactggcgatttgctcgccaggtcaccaggtcgcccgtattggtaatcactggtaggggtttactagtgattaccagtagggcatagggttacctcgacctagtaacctgatgaggtgaattcttctaaatgccttattgcagagcaaagcgaagcaattataaatcagaggtcgtacgtccgtacatgtcaggtggccaaatacttaaagcattggtagttagaatcagtcgctttgctctgcaacgactatctcggcggccgcaggccgacgagatcactggcaattcccctcaatcaaggccggtgttgcttacggccgacattatgtgaaaggacccacaatcgcgtcagcatctgcatcggtatcacgtacgcgactcatcgggagctaacatataatcatctttgatttagttatcacactctgctctcatgatacctagttgctattacgtgaaatagtaatggaaatcatctctatggggtttactcatggcaacctgcggtaagagcttgaaaacctattaaagagcggcctaatcccagcttagcacaagaaaaacatcaacgaacgttgactccatattgtcccatcccccttgaacaaagccgtcccagaaaaccatggcgcaattcggattccacactacctctgatcaggctgcagaagctctaaatgcgtcgattcgcaacaagactagtaagtttcagactaaattgtgagccccggagtttgttgctgagaaactactctctcggtcattattaccggtgtcagccccggaagtctcggtgcagataccgcgcgcgccctggtggctcaccaaccagcgcagctgatccttgcgagccaaagcgagaagatttgtgatgttatcgcctctctggacataccgtctgagatagtcgtccgagcactctgcctggacctctcatcccttgaaacagttcgcgttgcggcggcgcaggtgtcggaatgggtagcttctattgatgtcctgatctgctccgctggtatcatggcgacttcgacctaccagacttccatggacggcttcgagctgcagtttgcagtcaaccacctgggccacttcctcttcgccaacctacttattgaaaagcttatggctgcgcccggtggtccaacagtggtgaactataccagcgaggcgcactcgcgcgcgcaaatggatttcttggacgacctgtcttatggcagtcatggcggtaattacaacaagtggctagcttacagcaattccaaggcctacaacattcttttctcggtgggtttggtccagaggtttggcgtgcaaggcctccgatccttcggtgttgacccgggtatcatcgtgacgacttcgttgacgcgtagtgtcccaccagaggacttcatcgctctaggtgagatgcgtacccgtatgaagtattcattggtactggcggcgcttaggtgttcttggttaggctaggttgattaacagggcaaactgagctccgccataaaaacaaagacttcggcagaagggtcatcgtctgcgatcattgctgcctttgacaagtcacttactagtaagtgggattgatatctatggtgttatccgtgacagtgggaagaagattactaatattttgatgaagatgaaaaaggatatttcgtcgccgatggcattctttctaatagtggcctaaaccatgatgccgtggacccagatatggcgaataagctatgggaattaagcgagaagttgacaggactggtatcagaatgagggtgatggatggttcatcatcacgtggcaacgatagcccgtcctgatgtatcatgggtactgtacaagaaatgcaagtttgcactgagctattactcgtcagaggaacggacaaagtatcgatataaaatgccggtcttgtacgcatgttgaataaatccctgttaaacgcttagtagttaccgtagggtgtgacggttgtagaagaactacgttataaatactttcaagaaaattgaaaaatcaattcatgtgggcttttttatagtactgattttttactgacctcctaagataattgatactgaatctctgtctgccagctgccaggtctgtgcttgtcgaaaattgcagtaattgctgaaaggtctcaattgaatttattgaaatatcgcccttctaagttctgggtattagatagatatttaaaccaaaccgacaccgaagatatcatcatgactgtggcctagggcgttttcttactctagaagagtttctcggaggatatcttctgcctctctatatcgtccgttcacatagaggcagtatccagtctcagacttgtactcgagttcttattcttgttgtatcactgtagcctttcctcgggctacgtctaccagctctgttagggaagttgaaataggtatatcgtgaataacagcctccaccactcgtaaggaagcttttgcagtgccgatataatcaattgaaaccaccaagagaagctccttcgcataggctgccgctaccgccgccgtatagccttgccattccttactcttgtgtgaatcggcgtagtcatagataccccgaatgaccagatatggaaagtcattcataagtcctgccgcctccatttccatataatatatccctaagtcctgagccagctgatctcgttacttgccacctttcacgacttgattagcagatccaattagcctgtaatagacgactggttctgtatgttctcgtgagggtcatagacatagtttagatcgatcgcaattcacacatgtatcgcacgcgatatattagtggaggcttcgctggcagaaacaccacctctgtacccacaatgcccaacggtcaatcacgtactgtaccgatggcggaatactttatcatagttttcatccggtaaagcttggtccatcttcttaggacataagtggatgaggaagtcgggtttcgttaccttttttgtgtcgtagatgacgtccgaagccatggtggggatactgaatgttaggtttggttgcaatgcttagccagctagccgagcaacccatggtttcctttcccattactttctctacctagcttgctggaggattgattcattcgcgatttacatgccgtctactactcgaaagatttgcatagtcttcgttttaatgacgacagtgaaagaatcgtatgctgaatcggctgtgcttgctcccgggaagcgttgtgtagggtccgtacttgacggtttctatcgtataacacgaagtgtctttggagatctttcttcgctatgtgctccattgacttgactgtccatgtggtgcttatgtcgtacttatggagtgaggcgagaccagattattagcaaagagaaggcaccaggtccaatgagaaataagggtccggaatgatattccgtcagatatgcgctaagaattgtgggcaaccgcatgcatctggtaacagactacccatgcccattgttaacgaaaatttatccaactgatctctgacagcatagatacttaaactcgggtctttttgatctcgagaaaggagtgattgattcgtattagttttgagagcctgaactcctgcaaaaagacgccatgggtcttcctggtgcttatcatcaaagtctgccatcagaataggattggttttcctatttagatgggacttaagcaacgtcattagctggtcgagcagtgcgacagcagagttaattccatcgcgagttccctgtaccagggttgttgcataagtggatggaatcactccaacaaaggacgctgggggatccgtttccatgagcatgccatgaaactgaacaagactttctcttgatttgagaatacagctcaccaggccgttgagaatggatcgatcgacatctgtgtccgaagtcgtaaagtattttgtcattgcatagtagccagggcatttggctacttcgttaaatgcgtagtccatcgtctgacctaggagactactttcctgccaccggtcttctgccctggcaatctcttggatcgctgatacgcacgtccactccgaaccacctagaaaacagggctccgcatggataaaggcatctgcgactaggtaaggccgccaagaaatgagaagagtgcgacccatgccatgtgtatgtgctgaagggccacgggcgcagaacaggtggcggatgccatgtgaatgaatgatccatgagcgatcactactaccatctagaacctcatagccccctagcaaaatcgcagctgcaagtgtttcatctgctagtgcggcccgtgtatgtaggagagaggccagatggtttacaccccgaccatacatatgacgagcgcacattatggcttctttattgcctcgtgccgcccccatgcgcaaacaggttaaggcgcggagtgcccagatcagtgcctggggaaatgtggaccacctgcctcgtataaacttcatccaattcatctccacgcgggagttgaaggaagcgaggtaacttggaaaatggtagtccaaccatacttcgaatgattcctgcgtttggacattgatcgcctcgtaggccaaatttggagcaaaggcttcgtccattgttggtcgaccgtgttttagggtgatatatcgcgtctggtccttgaatttgtgaccacgatcatagcctgggcattccgaaccccagttaatacaccgcagacattccggacgagttttatcgcactatgtatcctttagttcatgttaccggctttattttgagatcgcctcttgcagaaaaaaacggatgagaggtccggaatgacatggtaccgcaatatatcagcactaaccttgaccttgcggcttatacactgcaaacatcctttactatgagggacgcccggcattcttgttctatctggttgtcccagagtgcacaagatagctaggaactaaagggttaatagtatgaaattctacctccaattggtatatgagatgggaataaggggctttcgctacaccgctccggcagaaaatattaaaagctcccgaagtccaccttgaggatttaattgttattttgttctaatttctcagaggtcacataatcccatagtagtagatgagcatctcctttcctcccgtctctctttcatggttcaacacacaacggttatgagcccggggagctcgtcattgatctgatcttacaatcggtcaatatcctcggttctgtgtggatctctctatacaggggtctggttgtagtaggccgtggtgtccccgtctcgttattatatggagaaggcagagccataatcgagcgaatgagtgattctcacccagattctcacccagattctcaccctatctatatcacacagtcatttgcaatctacctataattctctcccacacattatctaatacatacgaccatagggtgtggaaaacagggcttcccgtccgctcagccgtacttaagccagtagataatacgccattaagtaaatatgacgattataccaccaatatagggtcctaattgtaaaattagccactgatatccaacgatacatatagagatagtgatagtctaaacataccaatcgcaggaccactgacagatccaaccataaagcagtcagcagccgtcccacgcacagtctattaactcccgttagtgtcacgattggcctttgcgggactctctcataattagcctctaaataaaacatgatagcaagcccatcatgcaaagaatttcgaagtcagaggaagcacacaatagaaactagaaggggcccttttcacatgcatctcagctaccttcgttaacgtatcacgtagggcttgtcacgattggcacttgcgaaactcgtactttcccgttcgggattgtaccgttggtcgttccttcctgttcgagggaactcgtttgcgcagacagtcgtaccttccttctgggataaatgaggatagggctttgcccccgaagggttataaagaccccattgttgtttttacatttgttttcttttctttccttctccatacttgatattcgattagcaatgcacttcttttgttgaaaggaacctggcacgtaacagttagtaaccagaagacaatcggaatcaaactaatataccggttcaaagatatccgcaagaatagtctatccagcaaccataaagaaggtacccgtaaagcctcccaaaatacgtattgcgatgaatatatacaaattgatcgccgcggcggtactagccgagcatgtataaagtacaaggatagctgtattataggtattgcgacgcccgaataggttggtgatagggccccaaataaaagacgagaaccctatagcacttagtatacatttatacagagatcagatgaagggtaatctcggaatagtatcgggccgggtagatcagacgaattgatcaggtgattgtaaacgaaatacagggcttctctacataacttatggagatcacgtgattggtgctgcagcactcccgtcgcagcaccgcagcaccgaaccaagggcctggtgctgcggcacttgtcaaggcctacttagtagtataaaccaagtagacaaacccggcggttatctataagcttaatatactatttatggaagacgaagccgccgctatagagtatatccaggactagagaaggaagatataagaagaatatagaaggctgtttaatataatacaggagatagaaaagaaggttttcgggataaaatccttcttccggaggcatcgtctaggccttttaccctgttagggttaccgagagggttttagcttagttaactagggacggtcaacttctcgccggggggtatatagtaaagacacttagaacccctatatttataaccttatctttcaggtaggaaggacataaggcctagctcttaagtaaagttctagagggacagtattagagaatcatcatcaccccggaaatgaaaaacgagttacgagatatctatacaataggagattatatactatggtgtgatctatataatccctatgcttactagctcaccgtcctagatggttggtattgttttgtcgttctcgtcttacctgcttggccaggctgcccatcgtgcatatccctcttcacttggtatattagctctagagttagccatggatgtcttccatggttggcaatcattagtggataccttggcatattagcgccttttcacccaactatgattggtccaggcaatgacacgaccacgggatgatggatcctttccacgccctgcggatgattcctctgtgggttggcagcttatctttctttaaattggctcctgaaaccttcctaggtttcttccaggttcctccaacatgtttcttatggtgagctaagcatttttgaattttctagccttggaacagttcacggattctgtttcgtctcctaccggaatatttccctactttttcttttgatcgccgtcgaccctggctctgagaatcgacgaagtaatgggctcatactccccaacaaaagagactgaaaaggggcttcaagcttcgctagaggggacgactgacggtactcacgtgtcaaatgttgactatggcacgcaactcccccccatcgatggcggaatgaatgcctggctgttcctcgctgcctgcttcgttatggaggctctcgtctggggatttgcattcacgtacggtgtcttccaagcgtactacagcgatatcccccaattcaagggctccggcaatatcgccgtcgtcggaacctgcgctatggtaaaaattgaatatctcatcttctaacccagcccgagctaacgtacatactccagggaatcatgtatctcgacctccctcttgtctttgccgcctaccgacaatggcccaaataccagcgcttcggctgcggtctaggtgtgctactaatgtgtgccgctctcggcctgagctccctcgccacaaatacaaatcaccttatcataactcaaggaatcttctatgcgctcggcggcagcatcgcctacgccccctgtatcctcctaatggaagagtggttcgaccgacgaaagggcctcgccttcggcgtcatgtgggccggcaccggaatcggtggtgtcgtcctccccatcgtcatggaacagctgctgggcaagtacgggttccggcttaccttgcgtggctttgcagtcgcgttgtttattctcactgcgccgctggtctacttcgtcaaaccccgcgtgccgatcgcagataacctacccagtccgccacccccgaacttccggttcatgtttacgtccacgtttgccctcttcgagttttgcaatactatcgaggcgctcggttttttcttaccatctatctacctcccaacttacgtacgtatgctcggtgcctcgacctccctccaagcactgactgttatcctcttcaacttggcctccgttgtcggctgcgtgcttatgggcgctatcatcgacaaactcgacgtgacgctttgcatcctcgtttcaactgttggatcctctatcggcgttttcctcatctggggcttctctatgtcccttgctcctctgttcctcttctcaatcgtatacggtctcttcgcaggctcatacaccagtacctggcctggcattatgcgcgagatagtccgtaaccagccttccgccgaatcaagcatggtctttgcctgtcttgcagccgggagaggtgtcggaaatttggtttccgggccccttagtgcggctcttattaaggggatgccgtgggagggggacgcagggtatggatatgggagtggatatggatccttgattgctttcaccggagttacaggcgttgtgggtgggggaagttatgttgcgaagcgtatgaagtggttatagcctctgctaactcactattgtgccctaccgacgtggtggatattggtggattatctgacaatggctgatatacgagcgcctctagcgatattttaaatcttggagccaaaaatacatgtgttcttagattctagggagttgatgactcgaatagcaatttccaactttaacaatcatccggccatatccgtcgaaacgaagtgccatttcaggccagttaatcacagagatggagcgagacagatcgccattttggagtatcgacatatgtggtgttgaccaaaacctccatcaccgaaatggccttatcaaagatatcaatcttcttatggcctatacttgttccatttgaaacaagcttaaaaggtacatccgtgcactatcggcatctcagctgtcaacgatctgcgcatgtacctggtatgaccgaatcacttggccattcatctgatcctccatcaacacaacacggtcaatcgaggtgggtttgccgagcctgatggtatactggcccttttcattcgaagagtgcatagcatcacttacaataggcttgctataccacgagctgatgaaatcacctagttgcttttaacgggctgcgtgttcctttggtatagctccgcttcgatcaggggaaagatccaactcgaggatacagtttcggcccatggtcttgtgtcttcttccttttatggcgcaaacaaatgcagaaataattacaagctggacagcactaaataaggaactagtatgaacattggatttttgaccgaattctctactatagcagtagtcagtgaataatatgatgattgaatagagaatttctttttttagaaaaaaacatacaacagtgaggattcgctggtggtcacccacccaactactaactcaccggcgnnnnnnnnnnnnnnnnnnnnnnnnnnnnnnnnnnnnnnnnnnnnnnnnnnnnnnnnnnnnnnnnnnnnnnntaagtacggctgagcggacgggaagccctgttttccacaccctatggtcgtatgtatcaaactgtttgtgggagaggtatatagaacaagggtgaggaaattgggcgtggaaaggactaagtgcaacaacaataggcagagtgagggttgggtgagaaatttcgggcgtagaagaggctaataacatataagtggaaggtgatataatggtaagcgccacttaaaaatcacgcgaccggaggtgacaagggtgagtgcgctatagacggggtgagaagccaggtaagaaatcacccaagtcgcacgaccaatgcattgaccctttcagccagacgaaagcagaatttcattggaccgtgtcgtttcccttgaaacgctcggcatgcacataactaaaactggaagcatcataccacaagtactacgcctgtattgacgccccgattggtcaggcctgggccccctcaggatatgtatgcggactgtgcaaaaaaataactagtctatgggaccccgcaccgtctctttttgactatgattccatatttgagtcagattttacaaagacggccatgaacagcctcaagcaactcaaaactgagttcaatgggcttctcactcatacccagtttctgctatagcaagatcgtgcctcgttctccaacactctcatcttagcctcgatttctgatcgcagaccagccaggaaagatcattgaggcccgtggtaataccttcggctcctttacagataattgcgggtgttctgaattagcttcaatcttcctgggaatgccatacaagtaccatttgtaagaacaatgaaccacaaggatttcttagttaaaccacgagtaacttcgacttgcaatacccaaggaaacgcaaatatccgattatttgttcttcacaataatccaagacagtcgtcttgagctagttgaaggccgaccaccagttctcctctctgcattgtgccccttaacgtcgtgccttctcaacccacccggggaattgtaagtctttgaacatttcgtgcaatgcaatggcttttttgacgctgctagcctgggcatttgggtctgctgctgtgttggctttggccggagtggtcgaaagggactctgagcaattttactcgcagatggtacatgctcgatttcatatgcaggaactgactgtagtatctggtcgttccactgggcttctataggctggttagcaagtcaccgtctccaagtaatcagggcacagagtacgaacgagaggaagtattgatcgaacaaccattgattaaagagcattgattgaaggcttcgtgggccggctgaaatggcaactggtgcaaggcagcggcattgtaagcgtcaaaatccaacgcggcatctctagtgaaagaagacgcgacgtcaagcttgtcaccaaccgtaccaggttgggagtacactgtgggaagtataggcggctggaaaaaacccatcatccccggttcaagatgctcaatttccattgggttctggtcctcgaaccaagactcagtataaaatttgtcatcatcactacccaaaccaacattagctctcaaccactctccactggttattccctcgtccgaacgtcagcaggagtgtcgaagacagactcctggcggggagaagcatatggctgaacattacgggtcataatgcagcaggacaggcggggattatgcaattgcattgcaaggctattttgcgcgcgtgatacttgatacgtagatacccggaaaggcgactcctgtccttgaggtattccattgattggatttatctcttttgctttctccccggcttgcgctagcctcattgtccttggcgactttgctgttacctgaacgcctttccgagctggacatttacagtggatagtcatgctgatccaactgccccctcaacacacatttctattgcggccataagaaagctttaattcacgtcgcctttgatattgtaactatttgccgctgacgtgtttgaggtatatatttcaagtcgtcgtcagtaggaagatcactaacaattccggaatggctgcggagacgaagtcaaagttacttggattctcgaattcttgttgctaatgataaaaagaaatcagctccgccaatgtagagtggtaaatacaaggcccaccgtggttggcatgtcctgtggattgggaaaaaatgccatgatgcgattgagtcggccgaagtaggagagacgatcaagtctgacaagtcagccgaagagccgaccagatagcgaataatggaaagagatgggaaggtaaaaaagagaacggtaagctcagtggataggacaagtctctgagtgcgatcggggggtatctatagccttgaagatggtctgtgcggcaccgtgcctcaggcagttgttcagagactcgtgcgggacgcgaatactcagaaatagatggccaatatagtcgcagagaaacgcacgagtgatgatcatgctgaaatacaacttgtcgatgtacctggcggaccaatccaaaattcgagaatccaacattcgggcttatggttgggtcattccgcagttgacggttgcatgtaagacagcacagactcgtacgaaggtgtatagcggccaacagccggatgcctgattttaatggttttatagcctaattaggactagctcttaccaattttagaccggcaggaaattaaaatacctgaattactatgacagatctcctagtaccaaattgagaacagcttgaaagttgaaacatgaagctattcatacccccccccccccccccccccccccccccccccatctnnnnnnnnnnnnnnnnnnnnnnnnnnnnnnnnnnnnnnnnnnnnnnnnnnnnnnnnnnnnnnnnnnnnnnnnnnnnnnnnnnnnnnnnnnnnnnnnnnnnnnnnnggttaaaaattggaaaaagaaagtttgcataccccccccccccccccccaaaatactatttctcatcgatcctaggcgttaaggccctccaactatatgaatctcctgtatttaaagccattcatacccgccgtagtcccgcactttcccggagaaaagctaatagcgcaactgacaccaaggcccaaaacggttggaaagccaagcctggatttcaacacaaagtccccattcctaccgaccgtataaacttcaaactctccgtatcctctggctccggcgtggcgaatatttgaatgtagttttgagaattaaaataggtagaaggcatttgaattaccccatggtaacagtttcgtctcttcgatgtgtacttacaaaagatggtattgagcggtgtcaaaggcggtctaaaactggtaagagctagtcccaattaggcgataaaaccattaaaatcaggcatccgactgttggccgctatacaccttcgtagactcgcaataaccaatcctgtggccgaaaatcaaacccttcttagtcgctgttatcgtggctcggtcgatcatgcatcaacgtgagacaccaatcctggtggcttttcatctcacgtcatgggcagcgagagttttctgaattcgcgaatgagatattcgagaattgaacacgatctcaatagcgtcagcgcaggcaactgaagtatgttcgattccgtcgactgatctggcaattttaggtatctatgcgctggcagctgttggggtacagtcgggtattcgtcattctgtgttttcgcggttattttggcctcagctaattgtaggagaatttgctaggacttgtgtcaggtttagcgggacagattgatacctgagtataagatgcctctatgatcccctctaatggcattatctcccgccttacagtgctcctctgatcgttggtcttagcctgagatacgcgcagttgttcttcactgccactgaccactcaaaccactgtaagtaggggacttggctggtatcacttccaagctgacaaaatttagacaccattgcctccatctctctcaatatgcccagagcaatccctcgcatgttctcacgggcgcccgactgctgcggcgctcagatgtctcgtcgccagacaagcagcaattataacggcaatagggacagatggcgttatttctgccgaaattgccctcgtatggtctttgatgattgggagggcattcgagatgggaatcccttgtgtgactgttcggagttttctcgtgaacagatcgagcatggtcgtgtttttgtgttccggtgcgcgaggaaggattgtaaattcaaggaagaggaaactcaatgattggtaggtcctgacactgcgcgtgggatgcaagtagcgcaggagcatgggatgccgtcaatgcagaatcttttcctatatactaaatgtcctggcatttcgaaaattcaattcgcattttccgaaatgcagacgggcaattgatttctgagacgtacgtacggtaccacctacctaactatggtgtacatatattctcacgtcgcttcgggatgctctcctcttaccacccaccatctcccgagttttgtcgattccaaatcaagttctttcatgatcttcttctagtgtctttcccaaattgtactccatacacattgacgagtggctctagtcacgccagctgctcgctgacgagtctcatcatcagactagaactttagcggtcttgacatgtcgcagatctgctaggttgaggcaagatcctgacatcgttatttctcaacatattattgcttcccaaatttccctttgactactgtgatattgacttctccggattccaatcatgtccagtcttcacggactccttcatcgacagcgaccaggaccgtggcagagattccgggcccggccttgcgtcttcctcgcataaatgctttacagttggcataaacctattccagctttgcctctcacaaacattcctgttgcgattatctgtatatccgatactcataacaccaagccccacgttccagatggtgacatccttatccatgctggtgatttcacacagtctggatcttttcaggaacttcaggacgcacttgcctggctacgcaacctaactcatgctatcaaaatagtgattgctggtaatcatgagctattgcttgattcagcttgggatgattcgctaggtcaagcagcctttgagcgagctcaactcgactggggcgatattatctacctggaaaatggggaggtaacagtttcctgcccgaattttcgccagcttagggagttcgaccaaggctccatatatgtggccacgtacatgaggcttcaggaaccgagtggatggtgtttaacggactccaggaggcgtacgagcgtactatcgctacagaaggaggccttaagaatcttctgcttgcaacgtgggagttaaccaaggcaatatatctccgcccggttgtagaggcaaaatgtttacttataaacccatctattgttggaggtttgtgggtttgtgggacaatgaacggaggcagccggtcaatgtctttatataatgttgcaatcctgttgttcaactgaatttagtcctgcctctcttgcctttcaactgattctccattgactccgcaaatttatggttaggtaaatgtggttaatggcgtattatcgcgatgggatattgagtaccgggccggtcaatttcgacattctaggttctctcatgaatcgcgctgaaatgcgagagagctacctttcattacttattcaagttacatcttctatccaaagtcggccatatctgtgtttaacccgggaatactcgcaatcagattctcctgatgaacctcctactccaacacagagcgtcctcctcttcccctaacacctctatccttcaattgaattcatcacaccccagtcaccctccgtccaagacagcgtcatcttaaaggcctcaatcttccacagtccactttcattatcctttaccaaatcagcatagtactgcgccccagacatcagccgtggctgatcgggctcattccccttcccaccgcggtagtgctgcgcgagcgcagaggcagtcgccgcggccttaacgccactgtcggcgatgtttatgcggatgttagtgacgaagtgagtggtatccagcttgctgatcacttcgaaacagtcggtgtggatggcaggaaggcccgagaaggtcttatcgccgatagagaatgtagcggtggaggtgaaggcggagtcaaagagggccaggtcattcgtgtctagcccgaggacgcagcgatagagtgcatcagcgatggcgtcgcggccgctcagggtaggtgttagggctgcgggcagggagaaggatgtcatggtaataatagatgatatgggagtaagaaggatcgttggagtgagaattgtaggaaaagccggggtattcctatcaaagaggaagcttggcgttgaggtgcgaagcgatttagatatatagacctcgatggttgttaactccgctgaaccatttatctccaggaatccatcggagttaaggctatctcggacattaccagcggtctcatatacagtgttatgtgctgagcaggtagatatgaccttatttccccacctggacttcctttctttctctctcctagctagcaattacaacgacatcttgcgaattctggcctcggataggcccataaggcgggcagagtactaaaagagaaacagacaaccttagaagccaatagttcggtcttctaatgcaacacatggggagtactattgttagtacatcatacacgggaacgaggcctgctaaatctccttgaaatatttgcagaaggtgcaagcttaatctgagcctacctagtcctgtttctcgtactgtgtaccgcgatatatttgcagctgacgccggcaggcacacttgtactcctgtccctggttgattctcctcctcctactcctcctcctcctcctggtgctgagggaggcagagaagatgaacatgacgatgagttgagtcctcgaccaagaagaagaaagcggttagtcaagtaatcttcattggtatcttacatatctcatttttttgtaaaacatgactacgagcacattgactatttccaacatctatatcacaatagttgagctcggcattatgataaggaaaagttaaaattttgctatttgctccctacttgagcagttcaagttttacagctctgacaactctccaacacatgcatcatgacgtggcccgtcttgtagacctctattgacaaaacaagtttactaatagtaacaacctcatcgataactaactacagagccttccaaatattaaaccagatgcttgataggtagttctcatacattgatcatgtagaataaatcacctgaccacggggaaagcagcctagtccaaaagcggttagtggcgattcagctcttggcactcacccgtgagttttgcgtgtcgcgaccaacctccccaagtgcccccagcaacccgtccaatcatcactttaggtctcctcttccatctctcgcggccttcattcacgccattactggctttttactgtttaatcgtatactaccattgcgctttacacggcagacagactgatacggaaagaagttgacattccgccgaccgcgacagctgtttgccttgatccatcatggatgacactcacatcaaccaagctgcggcccacgagaatgtccagtctatgactggcctagatggcgcagctgatgcagctcgcggagcctctggtatgcctactctcaaatggcttttatgttgcaccgagtgctaaatttgtggacaggagcgcaatcgcgccagaattcgcccgtgaagaagattgagaatacacctgggtccgacaatccgatgtacgccccagcatctcccaaacctcgccacggcggggttgaaccggaagacgaagagatgggtggtactgagaccgatgccaagcccgacaccgaaggcttggaggatgctgcgggcgagtcgcatacgcaaggagagggaacagatgggcttgaagatgctgtgggtgaagaacaacccgcaccatccaagtcgtctctggaagccgccgcgcgcgaacaactcgtcacgcaaacacacgccatcattctccccagctatgcgacctggtttgatatgaacaccattaacccaatcgagaagaaagctctcgccgaattctttaatggccgcaaccgcagtaagacgcctgctacatacaaagattaccgggacttcatgatcaatacctatcgattgaaccccatcgagtatttgactgttactgcttgccgtcgcaaccttgccggtgacgtctgtgctattatgcgtgttcactcattccttgagcagtggggcttgatcaactaccaggtgaatgaccgtgttttcccattcaagcatcttatctaacatctctgcaggttgaccctcagacacgtccgtccaatattggcccgccattcaccggtcacttccgagttgtcgcagatactccacggggtctgcagccattccagcctgggccaaaccacagcgtcacgtccggcaagtttcatccaggcacacagcgtgctgtctcttccatccctgcatccaaagacgacctcaacctcgaactccgccgcaccatttacgatgaaaaaggcaaggatatcacctccgccaaagataaagagaaacagatcaacggcgaagcaacaaacggcttggacattgctcgggaatccaagaagaaggcacactgcttctcttgtggtattgattgcactaaacttcgattccactacgctaaatcggcttcgacatcagccaatgccgctacgccagacaccaagtatgatctgtgtcccaactgtttccttcaagcgcgaatgccttctagccacaatgcctcggacttcgttaagctcgaggacaagacctactctcacttcactgacaaaaacactccatggtcagactcagaagtgattttgttgctggaaggcctggaaaacttcgatgaaaactgggaacagattgcgagccacgttggcacacgatctcgggaagagtgtgtcatgaagttcctacagctagagatcgaggacaaatacgttgaagatgtcccagagccgcagttgggcagcggacgcgaccccatcagccagtcagaaaaccctgttctttctgttgtggctttcctggcccagatggtggagcccgcagtagctgccgctgccgccggtcggtccgtcgacgagatccgcaaggagctccggagccagctggagaaggggcatgacaaaggcaaagatgcagtcaagtccgaagattctatggacgtagatcccgcacgtgaggccgagcagcaatccgcgaagcctaaggagactctcggcaccatcgccctggccgcatctgccgcgcgtgccggagctcttgcctcgcacgaggagcgtgaaatgacccgcctagtctctgctgcagtcaacgtcaccttgcagaagtttgagatcaagctgcagcaattcaatgagatggaagagattatcgaggctgagcgtcgtgagttggagcaggcgcgtcagcaactcttcttggaccggatgacattcaagaagcgtgttaaggaggcccaggatgcgctccagactgtcagcctgcagggccccaacgaacacacgcatcagatgctagccgatgctgctactacaggtattggacaccactacagcttccagcctgttggcggagatatgcgggctggaacccagcctctaagcgcccaaggtggtgctgactacaagacccttgacctgtaggcttcctcaatacatgtacgataatccctcatggatcttctgagagggaaacctaaagggacttttgtttcgtctcgctgagttatgaatattctgaactttctggcttggaaaaggcgcacttttgtgcccttttttttttttttttttttttttgttatctgctggagttcttttctgttgattctccctctctccagaaagtggattgttcttagggggttgaattaggggttggggatcttttttcatcaatgtgtttactctttaatcatacgtccttgatgggaagcttgtaatcttgctcaaagtagagtgtaatacctctcatcgcctattgagtggcctagttgaccgaactttgtcttctaatattgcaaccaggactctagcggttggccgggtcttctccttgctccgactcatcctcatcgtccccactctcaactactgcatcgtcgccagaaagaaccggagcggagatagcaactgccggttcgttgtatctgggccttttcagcggaggcatgtccatgtcttccttcagatcggcgaaatcgtacccgtactcctcccactcgctacggtagacggtccgatcccgccaattaaagacatcttctcggattctgcgttctggcagtagcttagtgtcttcctcgacttcttcttccttcataggttcgtcgaggttgaacggcacgggttgttccatcaacttcagaagattggcctcttcgcgatggctgatgttctggtctgtgagttctgcttgctcttcttctgggtctatttccagttcgtctggcaatacaaccggcgctggtgtttcggaggactcgtgcgtaggcaaagggtagttatcaaggtcgtctagctctgaatctagttccgaatctggttcgtattcaagttcagattctcctgtttctggttctggtgttgcctcaggttctgcttcttgcgggttgactgccatttcggtctcatcatccattccgacatcgtcgtccatttcaatgtcatcgtccatgatgccgtcgtcttcgctgtcctcttcgttgtcatcattatacatggttccatctttacggtaccgggtccactcgtgtgtttcgatgatctcctcggcttcttcgtaggtgaataccgtaggcacccagcctttccggttgttgatgtcttctaggacagtttcattgcgacgagcgatttccacgaatttaggcctgcattgcttcatatggagcacatcgatggcggcccggacatcttgcgttcgaacatacccctttctatcattcccactgcgacttgaactgcgcaatcttgacattgcaaagaagagtgatgattggaccaagcggcgcgtgacactgacagtgagggagtagaagtccacggcagtatctgcagtcatagaaggggtatgtccatacgatgtgattaggtcttttctgttggcaaggttccaccagttgttctcagcttgctttccaccaaagttcatgaacaaggcggaagaaaggcgaatccaatatggaaggttcagcaaatcagctgcgaggcggaggtcacctcgagcactgtcgtccttttcgtctgccagaccctctgcatgagctccagtgataatccagttatctccgtgttggtttgttcccgcttgagcttcaagaagggactctttcaatgatagaacatccgcatattcctctagtagttcgcagcattccgggctgacctctgtggccgctgggatatcgctcaagacaggcataacttccaggtgcacgtcggaactatactgggcctccaaggccttatgcaaaagtcggatgtattccataacctcgagttccgacttggtgccgattgcagtagcaatctctttgatgctgcctttgccctttcggtccaatgcattgaagaacacttccttctccgtgggcgtccagaccatcgagccatgttgactggcttggtatgtgctctcgagttccttcaacgaggcataatcaatgacctcatcgttttgcacgataaggtgggagtaggctcggagaaatgtgagaggtccacgcatctgcgggacgcgtgccataagcgcatcgccaatttgtcgtctgaccccatcgaatgacgggtcgcggttgtaatcatatccgttcggtatttgatttggagttgaagagcgttcattggacgagcagtgttgctcaaagtcggactgaggctctggttgttcgaagtcagactcaggctcgaagtcggactcggactcggcgtcgtcgtcgggctcataggcggaagcagagtcgctcatcgttcaggctcgcagatttgcagcgcatgcggaacgatcggtagcaaaacatcacagctacgcccttaacgaaatctgccacgtcaattcatcgaagagctatagaaacaactgaaaaaaaagttgagaattacaatgtatggtaactaacaaatttgaatggacatgatgacaaattgtaatatacagtgactgttcataagtttttaacacccccacccatataccgccttcctatacagtctacaccgcgtacaaaatacgcagcaagtatgggaaatgattgatctagagcacctaaagcatctctaagacaatgcctcgtgtacaggctatcattcatagtcaggggtggtatgcacacttttgtatggtatgccccgtaccgaccgtcacatgacattctgaatgtatttaaccgttgccaagattgttttatgcaacgttatcgataagattgtttgcactgtttgttcttgtgtttgagcttcgccggagaacaaaagggcatttgcaacatctgcatggagttcatacgctgtgtctcgcgattgagacatccaagaagatacttggtgaagagtcctctgttacaaaattatttgcgccatgtacgcttcaattcgaccgagtcttcagttcctccaagcattgtgctccgggactaccaagaggaaagcattcagtccgtcctgaaatatttgggtgaaggccatcgacgtctggggatttcgcttgccacaggagctggtaaaacagtaggttagactcgctctctatccaaaatggtactgatctttgcaggtcatattcacacagcttatcagccgaatccctcctcgcgatgcgaaagccaccaagaccatgatcatcgttcatcgccgcgaactcgtcgaacaagctgcgaaacactgcagagtcgcctatccagacaagaccgtcgaaatagaaatgggcaagaatgttgcgacgggagcaggagacatcatcatcgcgtcggttcaaacgctagcccggggacgcatgtacaagttcgacccgagtgcattcaaactcgtgttggtggatgaagctcatcatattgttgccaaaacataccgcgacgccctggggcattttgggttgaacgagccatctgccaatggaccggtcttggtgggtgtttccgccactttctcacggttcgatgggctcaaactgggtgctgccattgatcatattgtctatcacaaggactacattgacatgattggtgaaaattggctggccaatgcagtcttcacaactgtcaagtccggggccaatttgtccaaagtcaagaaagatagtttcggagactttgccctcggatcgctttcggaggcggttaacactacgtctacgaacaacatcacagttcgggcatggatggcgagtgctgagaatcggaagtccactcttgtattttgtgtcgatgtcgagcacgcgcggcagcttaccgccgcttttcgcgaccatggcgtcgatgctaggtatatcacagctagtacatctaaagtcgtccgtgcgaaacagctacaggcttttaaggaccaagagtttccagtgttgcttaactgtggtcttttcacagaaggcacggatatcccaaatatcgactgcgtgctcctagctcgacccaccaggtctcgaaacctgctcgtccaaatgatcggacgtggtcttcggctgtttcccggaaaaaaggactgccatgttatcgacatggtagcttcactagcaactggagtgctatcaacaccgacgttgttcggcttggacccagacgaagtcttggacaacgccagcatggaagacatgaagaagaatgatgataagggcactcaatcggaacccacccctgaggccgaggaaccatatgacggctcggacaatgacctaaaacttcagttcacgacttatgacagtatatacgatctcctaggagacatgcagtccgaacgacacatcaggtcgttcagcccgcacaactgggtccgggtcggcgatgaccgatatatgcttaccgatatatctggctgggtaacgattgagaaaggggacgacgatatgttcacggctcatcatgtcatgaaattcaaaaacccggcaacggacgcaccgcaattcacacgtcctcggaagatcgccactggctctgacttagaaagcattgtccgggcagcggatacctttgccagtaccaagtttgatgagcattacatcgcatcttggaaaccttggcgacgggcccaggcaacaccgggacaactaaagatgctgaacgcagctcgcattcgagatggcaatgtgaagcccgaggacttgactcgcggcccagccgcccagnnnnnnnnnnnnnnnnnnnnnnnnnnnnnnnnnnnnnnnnnnnnnnnnnnnnnnnnnnnnnnnnnnnnnnnnnnnnnnnnnnnnnnnnnnnnnnnncattcgagatggaaatgtgaagcccgaggacttgactcgcggccaagccgctgatatgattacaaagctgaagcatgggggcaagaaacgcttcaaggacttggaggttcagaagcggaaaaagctgcggcaagtagatgatatggctgagctgcaaagaagagttgatgtgaaggtcgggccagtcgatgcttgattggaataacatgtggtgccttgtaaaccattggatcaacgaacacgtttaacaagcgaaatttttctaaacagtcgcacaatgcccgagagttacgtgactatgtgccgaagagctccaactgtacaaagtcccagagcagcacccgtggcattattcgaagttgagattagtatatccgtgagctctatcacttatatattttacacttgtctcgggatatatttcggcccaagctgggcggtatgccgagacagaccgaggagccggtgcatactacataattgaaaatataaactttacgaagatgattccgattcagacggtctttcgggtatggctcttgatggagtcaggaacttgtagttacttggaccagcacatataggtttacaggtctacagcagtcttgagataataacgaatgtttgaacagagaattgaattgaattttgtcctagcaaagcatatgaaattcatcaaacgatcataatgtgcatcaataaacgccccaagtgggcgttcaaaggtcatcctcatcggagaacacctcctcaccacgcttgcggcgggcagcacgatccttcttcttcttgcgaagctcagagcctgtaagagaacaattagaatttgaacattgtgatgcataaggaagtaatgattggataacttaccagtaagcttgaccttctttgtaacaacgatcttgttgcccatggcatcgaacttgtcctcatcatcgtcacccttggcgtcgagacgggggccagagccctgaccctggacccaattgtgtccggagggggtcatgacaccgtcgttgacggcccagacttcctcagtcaggtgctcagtgaactcacgggagtgagtaatgataacaacaccaccctcgaaagacttgatagccttggagagggcaccgagggagtcacggtcgaggtagttagtgggctcgtcaaggacgataaggtgaggacgctgccacgagcaagcggcgagaacgaccttaacacgctggccaccggagagaccgcgcatgcgagagtgagaaacaagctcggcatcgagaccaaagttggcgcagtgctgctcgatctccttgcggacaaggggacggaactgaccggaggcgagggcctccttctgatcaacctcagcgacctgcttggggtgagagacaataatctcggagcgaggcaaccaggtgttgtcagcggacatgagaggagtccacttctcggacttcatgccgacgttgtcacccagagaccaagagatctcgtactcgtaggtgttcttgaacttgcgacgagagtggataccgatgacacggcggagggtgccttcaatcttgtagatcttgtccatggccttctcatcctcctcggtgacgatcttgttggcacggtccatggtctcgcggtcctcaccggtctggaaacgccactggatgtactcggaaggagtggagttgaggtggttatcgatgtgagcgaaagcgtgctgcttaatgtaggcaatacggatgttctcgtgctggtagacctcaccggaggtgggaatgagttcaccagtcaggacgttaacgagagtagacttgccagcaccgttggcaccgatgacggcaatacgggatccaagggagacctggaaggtaattccgtgaatctggggcttgggggtaccggggtactggaaggacatgttgctaacacggcaaatggccttggacttggtcttaacaccctcaaggaaaccgggctcggggaacttgaactccatctcggaggcaccgagctcgtagtaggaccgagcagcggggtgctgcttgacgaactcggagagggtaccacggtaacggcggagcttgaagcgctcgtagtgaacgacgtgctggatgacgttgtcgaggaacttggagtcgtgagaaaccatgatagaagtgcagggggagttcttcaggtactcctcgagccatgcgacgttcttgacgtccaagtggttggtaggctcgtcaagcaagagaatatcggggttctcgaagacagcacggcagagagcgagcttcatcttccaaccaccagagagggcagtaatgggaccctgaatctggaactcggagaaaccgaattcgttgagcagcttgccctcgagctcctcacggggagggttctgtccaacctcagcaagcttcttctgggtccaggcaatgacggtctgctcagtatcggcagagtcgagatcgtgctcgacgtagacggtcttgacctcatccttcttggggaaaccctcgagctgctcgttgttgatggcacgcatgagggtggtctttccggaaccgttggggccgaggagaccgtaacgctggccacgcttcaggcgcaggtgagtctggttaagcagaatcttggcaccgtaagccagggagaaagtgcagttgcaaagatcgacaccttcctcctcatcggaggcgatggcatcagcggcggcggcatcggggcaagccttcttgcggagctcctcagcgatggacttagcattctcctcaccgacgatggcagtgatgtaaggcatggtgttctgggtccagatgacgtggtcgttctccttctcgtcaacaagctgagcggcgatggcagcaacgtaggtgatggcctcctcggaatgggcaatgacgtccttgtgcttagcctcgaggatctccttgaggatggcaacgatggtggaaatgtcaccagcgcgggaaacctcgggaatcttgccgtccacaacgttaccaacacgggaaagggtgtcaagagcctggcgagtcttctcacgggcctcggggtcggcaagagtctcgaagttcttgttcaaaccgggcaacatcttaggcaagaagggagcgacaagctgggggtcctccacgagcttacacatgttgtcgacaatgacagcggtcttacgcttgatggcggtctcacgctcgacgagaccacggtcaagcagggggaccatgatagcgagggtagggccagtgacatcagtgacgaaagtagtggcaccgagcaagtgaacggtctcggcgacgttctcgggcttggcgatacacttgatcagctcgggaatgaaacgctcaatatccttgttgacgatcagaccgcaaaccttctccatggtggagtaggcagccttcttgatctcggccttggtgtcccacatagcctcggagatgacggggatcagagtgggaacctggtagccaagctgcatctgggcagactcaacgaggatgttgatgcagtcgagagcagccatcttttcgggccacttctgggcgttggcgagggagtagaggataggggtgataacggccttgacggcgttaccgctgacagcctggacaatggcgatagcggtggactgggcggcctgcttgacggcgacaaccttgtcaccaacagcggcgaggacagggccgaggagagccacgaggtgaggctcaacaccgggagcgattgtggggtgggcggcaatagcacggataccctcgcaggcacgctcacgggcagtagcatccttcttgttggcgagctgcttcttgaagatctcggtggccttcagaggaagagtctgctcggcgataggaccgctgaagagagtggcaaggttggtagcagcggcgttggtttcgtcggcgctggtggagatgttgaggttcttgatgaggtcctcgaggacagcgaccgactgggcggacgccttgccagtggcggcaggagtagcgtcggaggcggcgggcattttggaagaaattttggcggttggagaagagaaaagggtattagagtaaagaaagaaaaatcctttcttttttttctatgaggggtatcgtagaatttttttttttgagcaaaagactcaaatgcgtcaacttttcagacgcgggcgctcaaagattggagcgagacttttttctattctgtctatgcagagtagaaaaacaaaaaaaagaaagaggccgaccctcgaaaaaaagatgcaggagtggaggagaggagggggagaagggaaggggggtgaggatatttatcgtgtggcataacctgggcggcaaaaccctatgaaaatggaattcagattttttctgaattttcaggctcatgttccgcgctaaggtcgaattaggcttagctgattcgttgctgcactatcattggttgaagccctgctttggtccgaatcgcctgtccatgattggttgagcccgttgcctggctggatttggtttagttggtggcttttcttttattttttattcgtttcaatattatattgatgtctatgttgcatgttgtatagagcctatacggagaagttacgggcatctggatatgatgtgaagaaacactatctgtctgctctggctctcacctcgagtcccgcatatctcatgtgcatatccagaaatagtctagtccctatggtaccaacacttctatcctcgttgtacaatatacaaagtacatcgtaaccagcaaggcgcgcgagtcgtcgttcgccacgcacgacaagtggcgcagtgccatataaacgccaaatgaagacccccgagttttcccccaggcactacatattttcggagttgctagggtgttgaacgttattctacttcatgggtttattgttcctgtattcgcccagattcgggcttggtacctccgtgtcaactgtggatgcttaccactgaattacacatgtacctatcctatccgagactatatccgagactagatatccgtactccgtatgtagttgacatgtaggtcagagctgagtatgtttcagcaaaaataataatcatcggataagcccgtacaaataatatccaacagccttcataaccacctgaaagtgacaattcgtacaatatatatgaacgtccaattaaacgcgaatatcaaccacgggatgtctgagatttctttcaccgcttgatttctcttatcgcttatcgcgtgttttatacaaaaagccctccaagccctcgtacgttgtacattgcgctactccgtactaataataacatcagacgtaagcaactagaacaacaaaccgtcgagatcctatcccccgcgaaaaagaattatggtggcaaaacaaagaaacccaaacccaaacccaagccaaaagccaaaaaaaggaaatcggctcagtcggacccagtggacctgaaaacctaacaggttccttactttcaacaatgcctattgaaaaaaaaattcagtcgctacttcgtatagcatggtcactccgtaggaatccgagatttccgcgcgagcgaatcacaagggaggaattcttttttttttctgaaccaaaacaaaggttgcatctgacagtgacccaagttcgcaggttcgcactcgtttcttttccgtttcatttttgtctgaacgtggcgttccctcgccacttggcacttcgcctacgtcgaggcgaggtcatcacattctacaccgtatgcctcgacatacggctgttctatgttgtacaatatcatagaaatagagtaactagtggcaggtgtcatctgctgatctagacatgtcgttttgatctttagagagtggatccatcatggcatctgtacccggtgccccagatgtttatttgatggggaacggaggcgaatcttcaatcttacttagtctaacccctttataacgagttagctcagttatgctagacatgcatttagtcctgatccaccattgaatccggggtagatgccgtgtaaggaggttgtactccgtagtgcaattgtgatcttgttgcattcgaagctctgatcctttcatttctgatctatttacttctgtttcttgtacgttttattctttcctctttctctcacggcccctttttacccatgcttggtgatgtatccaagcccctttttgtggcgtagcgcttagacccttccctttctctctgatatatagtcctaggggctgggctgagatgacgggcctatcactttgatgaagcagaaataaaggggtaacctatcggaggtcggtcatctccacgctgggaaataccttcatcgactccacatttatcgcaccgtcttcgctccgtccaactagtctcgctctcgatactttcagccaagagaacgtctacggacacactcttttacttgcgatacactccccgctaaactacttcgagtacgtctcccgctggccgcaaattttaatcagcttgtgtaagccttcatcctcaccttcatcaccaattcttcatcgaccttgaccagacttgccatccttttgctagatagctaggtatctatgtctcatcgtggtaaaggttacagacgggcacgcccgccacctcgttttaaagagtataaggcccaattaaatgctacccagggtatcctttgcccagattgtcgtcaattcaagcttcgatcacatggctgtgacccagtttgctaaacctgcggcaatcattttaccccacagactggctgtccagatttatgtgatactgctccctgttgtggctgttgcgataagaaacttattgataaatcgtctgaatcttttatgattagcactaatgggttaccagtccagaaggtatagttgtcttactacttagttataagaagtttatacttactaataggatttttctccttttaggttattttccattatttatgacccgttattaaagtacttctcgacttcgtccttttagattagaccttagaggctgattttacccataccccctactatactatagtattagttgacacggtgagcggagagccagaaacggctgccattgcaccgcccctctgccgtctccgaccgcctgcccttctccgctaccacatccgacaatggacccacatctatagactgagagcccgccgtgacttgttgcttcggatttatgttgcaacgagcttcgcggcatttaacgcccgtctggcatggtcagccggacatccaagtcgcaaaacaactcctccaaatcaactaaagccctaagacaccctgtcataattgtagaggcaccaatacgttgaacaacggagtgtatttcgagataatcaaggagcccgttagacaatacgttgaacaacggagtgtatttcgagataatcaaggagcccgttagacttgatattcctggacatagcaaatgcaatgatgttgtaaagtaacgatatccgtagaatccgtggatcagtggctcgtcctcataagtccactggtaggtaactctttaggtcgtttgccccgtttttcattgctgtatgtttcccactgaggaccccaaaatagacgtgcgcttttcgcaccaccgccattttgggccagccttaattccttttcgcgcgctcgtactcgttgactgtgggttttgctttgacgtttcctcctatttcttgcggcgatctcgtctgcactcttgcccgtaaatattcttcgtagccagtccatgaatactagcagttgatcgggttatcagatgcggtatctgcagccccacaacttttgaatggtgccagtgagaccaatggactggagtgtgttctgtagaacagagatctttgtctgattttacggatcaccattagtatcatatgcggccacatttaattgatcatacatacgctgggtgcagaagtcaggtaggctcaggggttaaaatcaggtatagacccatcctattaattggatttcaaataaaccataaagccacgtgactatctttgcttatttactgtatcgtacgctggcatcccccaccactaacgctcttggacattttgattcttttgtccctcggcctagttagtgccctggcaacaaaatatccagccactcggcagagaacggaccagccagggtgcatggatctacaatctcgcagactcgagaggccggttctgttacgagccaattcgattcagaagaaaggagtgcaattcaaaccaaattctaagtacgaagaagaaaggaaaaaagagaaactatctgagtgcgcgttcttcccttcttatacccttgcgtttgtcttcgcttaattctcgttcgtccacttggaaaggtacaagggcatagtcgttcctgcctcgtttggcaagtacgatccttagatcgtcacaggttctatagttgctcggcgttttctttgtgcgcgccatgtcctgctgctatttgttattctttccatgcattaccagtttgcagttttggactagcgtcactctgaagctaactaaccgaattgagaatacatacaaaatgcatgtcttaatggttgagatatatatttccagctgagcatcgtatcatcacaactatgtagcctttcaattttcttgggatcaatacctaggaaaagcgttgagaagctttattgatacctattaaatgaccatggaagtaaacaagaacacggctgctataatttgaagttataaaatatcgcatttactatgtgttttgggtgggcggctagcttagaaattacgttatccaaggacaaaaaaaagatgtataacgacagctgtgtgattcgaacacacgcctccgaagagaattgatttctaaattgggggttagtaagagaccttgcttggtcagaggtattaggtggaactcaccgagctgtgtaaggttagcaactgctgcttaatttggcggtgggatttaacatactcaatcgccttagaccactcggccaaactgcccttagatgctgaatttctccactattgaatcctagtggttactattcttaacctcagaaagcgaccgtccgtagcacatcagtatcctgagaccatccatgtgacaaaggacgctatttctggccccaaaagcggcaattttcggcgtcaatcccacatgtcctcatattctagatgtaaaccagaagtgggcaggatacatggcagaaatatggtcgaattctaagtagtacccaatctggaaggcggtactgaactaggtgggagataatgtctgcaatgcctccgccctcttgtacctctgggtataaccctcctgatctatagaatacttatcacgagcaccgtgcgccagctcaactagcgagctgaccgtattgcaaatgccgcgcccagttgcgggtgagaacttgacaaagcgatagtcccgctgggttgcaaacgcttcagcttccgcgtgcaacactggggcttcaccttcacccatggcggcgatcattatcgcaagaaagggggggaccccgtcttcgcagcggctgcgcatcctcccgcaggcggcgaccatttcgtcctacgatgtcctcgacgaagcgtcgtacgtgaagacgagacagacatgctgcatgaggcagaggtaagctaggccaacgtgtatcagagaggctagccgggcttgtacgacgtgcataggtactccaagagcccccttcgctgcgtacatgttgtacatattcttcaatattattgagtgttggcatgcatagacacttgaatatatggcctgtctatggcagtaagtctacggagaaaaatgtgaagtggtacagattagtatgtgggaatgcacaattctataaaagaacaaaaacacacagaaccgccaacacgcccagaaccgtcaaacagaatcagtccatcctcgaacccgcaaatctatgtccagtgatcgaacaataaaacgaagcagaaagaaaagaaaagcacaccaggatatatacaagacgtcgtcatagcagccgccagaccagagaacggaatctgaagtccggggttgcgggggtcgagtagtatcacaaggtcctggtgattctcactaggagaaacatggcctcgtggattaggtgtcgtgggaagaggtggagaggttgaaggagtggggtaaaaggcaggaaaagatggggacatcgatacgtaaaatcgctgggaaagacaaccccgatgtctgtacaaaaggtgaaaacgctcgtaactccagacccatatgcgcggcgcaactccgtgccaaaaggcaaataaaacaagcggaacaagaacaacagacgtgattagctttcatggcttcttcttaacgtggctgctccccgtttcaggtgggagctcgtcaccatcgatgatacgccacagacggcgcggtgagaagttgttgccaaacaggtaaattccgacgagccaggctgcgaggagattggcgaggtggtggagaagatacgcatatgagacgccatagattgctgagtagatagcgatggcgaagaagatcattgaggtgacgtgtctgaacctatagcggagatggatatgttagttggaacttgtgagatgtaacactctagagtctacatacctggtcgtgatgcgcggtatcatagcgccgctggtcatggtctcgacgagaaggaggaagggcataatagataaaacgttgtggtgggatgagaacggcataaaccagtgcacgacaagattgtgggcccagaccaggaggaccagcacgttaattggcagaatccacaacatcaagattaagatggagtgtgcatagttgtcgaagttcaggtgcgaggtggatctggtttctttggcgtgccattgtgcccgcacacatgtggctagctgcacaatgcaggcgaccatataggcaaactggtaggggatgacggtcgagacaaggatcaaaaggatgacggtgtggatgatgcgtcgtcgaggagtgggagtgtggaagataggcaggtttccccggtcctctcgccggatgtagcctgacttgctgtgtacgaccccataaccccaggagaagatgttcacgagggcaagggcgagatagttaacaaggacacatacaccaacgctaatgaggccgaataccgggactaagaaccagaagaaagcgtcttgtgagccaagcaataggtcattcttggtgaagtcgatgggagtctcggtcgagttggaccgccaatggagggtttcgtcggtctggggcagggctttggacgtagccagagaggtggccagtagagacatagctaccagcaggagcgggaaggaagaccgcaacgcacgatcaaggccctcggtgaagggaataaagtaaccagactcatcgtagacctggaactgcttccggagaacgagggcaacgacgagcagtgggaaagccgcgaatatggtccgatacagcatcactagctcaccaagactgctggtgagatcaacttggagggagatgtcgaccgtcgagtcagaggttggatccgtccacaggtgaaatgatacgcccccgagagcggcctgctcactaattgcaggcggcatgtacggcgccacaccgtgcaggttcacgttgacctcattgacattgacgaaaaacttcgactcatgagggtcagagacggattgacggagcaagggagcgaacagttcctccttttgaggatggcgagtgatcttcaaccggtagtcgagcagactcgaatacaatgccgggatcttaacctccatgagcattggtcggttggcgggtagccgcatctttaggccagcactgagcagccctcccaacccaaccttagcccgaatcattgcatccgagctgtccgaaaactcggcgataaggaagcctggagttggtacattggctttgtctacgacagccacaaactgatgttctgcgagcgcctccaagtcgtattggagatacgaaaatggtggggtacgatcgtaagcatgtttagatgagcgggtcgaggcaggcaaatgaatactgtcctcagccgcgctcttgcaggccaaacgggttgatcccacagtgccaccagagaaatctaaattcaagggaaagttggttgaacggccattggatagcgggaacacgctgcagaataggacctcaatattgccattcttatcaagcgattggtccgtgagcagggtgaactttttaccagagacgccctgcggaggaatcggtaaaagacgaacatcggggccatgctgtaggcccagttcacgcaggatcagccgctggccctgcgcaagaatcgtgtttgcgttatcctcaagtgtcagaagtgtatttgcctccttctggggcagtgtacgctcggccactggctccagacccgtcaagtaccaccgcttgagcacacgcatccgttctgcgcgtggtttcgtttgagtagggcgtcgggcatcgacgatctcaaacaaggatttaatgatggtcttgcggaactggtcgcaccaagtaatcgacagatgatccatgccaatccagacatccggaatagaagaggtgaatacggtaaatccgtgggtctcgggaacgagagaggagatactggcgtagtcggagggcaccacggtgtcacgcgcaccacccgcgatggagatgagagtgacatgccagagtgggttattgttcgcccaagtctgcgcataggcgtcgcgccaatagtcgttgatttgtttataggtgtggacgatatcggaatcgaaggaaacaggcggtttcgcatgaggtgcagacatggtgatgatcgtattgaccgaattggcttgatagttcgccatggtcaaagcagtgcgagccactattccccccatagagtgtccaacaaggattactgcgctgggatccggtaacccggggtctcggcgggtgcgtcgcggatcatggtaaagtgacaggatgtatgagatcgcctcgttcacgtattccgcttgatccaacagtgtttgtccatggaacgccgccatatcttcgttgaagtccaccatgaaaaagtccaagctccgcgttccggccgcatggcggctctcgtcgtgtcggaccacatcgtagtaatgtcgcgaggcctcggcggccagagatcggacttggcggtagcttccagcgttcccgggcagaaacagaactgggacaccgttcaactaaacacagagtcagtaagaatccaagcgcatgcaccgagtccgggtcgccgtaccccgatgttatcctgggtgtaaggatccacgccttcttcccgatagacgaagagattgtatttgcttgcaaagcgggtatgttccgtgtcaaactccaacatacgaatgaacgtcgggctcatcatcggaacaccgcaaccgtctccgccatgttgccgaccggtgaacgagccgacgatgcagactaagatcgcgacagcagcgcaagtggtgaaggccgtcaggatggagcaagaccatggactgcgttggcgagattgtcgcgcacggcggccgccggaaggggggacttccatcggaagtcgcggggagcccaatggcatcgatttggtatcgttggagggttggaaggacggggtgcgccacatactcgagttccgggagcgcggtgtcgcgctgccctcgcggcgaaggtcaaagctggtgccgcgctgagctatctgagatcgggttttctcgtcgatggcgtttccatcgtctgttcgggagaccgaggaatcttcgtcctcgacaggggagcccgacgagcgtctgtgcattggagaaggtggagccgggacttcatccagcacacacagacaggttcttggcgcagggggttaaacctcgcaagagaacccttaacgagtaaggaacgaggggaggggaaggggtgggaatggggaaagacaagaatggaagccggggcggttggaggtttgtctggggtcttggcggagaaaaggtgtctgtccctgacagtccgtgtcaagtccctgaaagtggtcttttttgtgggtacacgtgtaaagtgtttatggactttagcagaggttcttctaatctttgatctcttacgatcttgacttaagatattcaccgatgctcgtttctttttttttccgacgcaattggcaatgtaggcttggcactacatagccctagtttgttaatatgaagcaagcctatgttgaggatggcctacaaataatatactattttatagctaatataaacagaatcggatcaagacataaggaaagctcaaggtcatatgtatagatgcgctgagccaccacggcaggcaatcgtgtatcccctcataatgttcctgcaggacgcgtatgccacaatagtaagactggccaagtgcttattaccatcacaaatagtatctccgttagatattagggatcgcatactatccttgtacaaccttgaaacatttgaaaccagctggatgttccggtctacccgtggacccctagatatgtagacgactctagttatgttgtattaactattaggagcaatgacgtgacagactctggcaaggctattaccacggagtagtatagcatcacagcgctatagaacaactagcatccaattgatttataattagctctctttttatctcagttgattttgtttgtattctcatttaaaacaattccaatctcagctggatatagtgtacaagtgcggggtgtagaattcctgtactataaagagcctctcctaagtctcacgctcactgtgtatttgctctttgtaggatcatcactattatctagtataggctggtactacgtgatttctttgtgctccactgttacacttaaggaaattaagataccccttaaccctaagactggcctgtgcaccagaatgagcattgtacattaagcagattcagatctttgacacgacggaacatctactagtacttaccaaggccattgggtgacacccgctaaccttctactcatagagcaacgaggatacacgagagcgaagggtactaccgaggttaatacacaacacaaagcgaatccgtgaaagccaattcattgtcctatccgattatcccattttaatgtcccttccacattctcccaaacaaaaatcccaggtcattgaaaggtccagaaatacaaagcaatcatcagtcattgcgcgagcgtcaggtatcacagtagcctggtagtctacggcacaatagtagtcgtagccttctcaggatcttccccgaagtcctccttgggattgagaccacggtgagcagcaacctcctggaggtccgcatcatgctcagcatcgaagttacgacccaaacgctctggtccagcaattgtaatcagaataacataggcaaagacgcagcccatgaagatgcaaatgaccttgccgtactcgtagcgatgggcggcttcttcagtagggggcaacgggaagcgttcaccgatggttgattcaatagtcgagctagcggaggagaccaagttgccgagctggtaggcggtgccgacagcgaaggtgcggatagatcctggtgatagctccataagatggatagggatcacaccccatgcaccctggaccatgaactgctcgaagtaggccgcagcaatgacattcttgttctggacaaatgtgtaggggtagagaagggcaccgccgatgatggagatggcgatgatagagaaccggcggccgaagatctgactggcccagccgcataatacaccacctgacaaggcgcctaggttggcgacaacttgtgtcacggtgactgcgttctttgagaatttgaactggttctccagcattgtcgggtaaagatcctgagatccgtgcgactaatttccatgttagcttcttctgttactcgaatagcaagtaatacataccatgaaattaaacccagacataagcagaaccaggtatatgagtatcaaccagtgtcgctgtagtgcgaccttcccttctgagatgaacgatgccgcaacacctccacgcaattcctgtcgcgcttcctggcgccgacggaaagtctcagtttcaccaaggaataaccggaagatgatgatcaagactggtggaccagcggcaaaccagaacagcggccgccagccttcaggggtagtatcgactagacctcgagcgaaagccgtggctagcagatatccaaaggcgtaaccttgctgcaagagtcccgagataataccgcgggcttcaggcgggcaatcctccagcgcggtggcagccgcattaccgtacaagccacccatggcaattccaaacaaggcgcgacaagccaggaactgtttataagtctgacagaaaccagcaccaagctcgaggacgacgaagagcaactggttgacgatgaacggccatttgcggccccatcgatcggaggcgattccgaaggtgatggcgccgacagatcgcagcatcagaaccagggtgatttcccatgtgatatcggtgacggatttatcgaatgatttcgccagtgcagaggcagtaagcgagacggtgaagaagtcaaacgaatcccaggaccagccaagaaacgcgacctatagggttaggctagttagtcaaggacgtttcctacctgttagccttatggggaggaggacataccgagaaattcagccactgagaccggttgagcagtgtaagagccttgaacgggttcggcgccgggttcatgggaggcactagagaggagatacgagtggcgatgtagcggccaacactcatatcctcctcgaaatctggcgaggatgtcgccgcatactgagtctttccctcatccatgactgctaaggatcttggagcaccgatgaatcggagagtaaaagccggatcctggcacaaagtccgaatgaagagggataagagaggtcacaagtcagccaggggggtcctgggccgctctaaatacggcggggaaccctcctctcctctctgctcaccgaatttagcgggcatcccgaggaccgaaaggaatcaaacaaatgaccaccgacgtctgcgggcccgctgtatacagggatgatacgttatcttattcgcttgccacgcgggtcagcaacctggaattcggagacgcgcacgaatgagggcaatctaagccgatcatagtacaattacggggtatgacccagacaacgagagtccccatggggagaagctagaaaagtctgcgatgcaaaatgacttaatggcatgatttttctatattgtccagtggatacagcttgatgccaggcactaagcccacagtctttttccgtgaattctttagtggcattctttgtcttttttatctagacctttctataattgtttcgtaaacttttctgagaactttgcaatctcttccggtatgtgctttgattcggatgactacatctaccagtcacataggtacgaaagtacgcttactttgatgttagtgtcttacccaagaacatatcccggattatccacgcggggtgtggagttgaaaaatggaggggaaaaatggggaaatccccccacaaaaatagcttttctccttgaacttccttgcaagccactgaagccaggccggccgtaggtcggtctcggggtttaatcggctgttataagtattgtcaccggtcttgtgtgctaaactaaggtagaacattctggactttgttctttttttggggaagagacacttactacatagctgctcacgatatagtgcagtaatccatcctcccacactctcagattgtcctttcaatgattcagcccaaggttacttggcagggcttctctgaagtaagactttgcccaggtccatgggtggatagtagactgccaagaattacaggggacaatgcgttggccacatggtcggcttctccccgaacatcccaagtacggggtacggggtactcgatacggaggatacagaagagtgccttctaggcgtactttgggcatggcagtatcacactcggcatcgcgaactgtctagacttactacaagatccgagatctcagccggttcttgcctatagtgccgataaatgccatgctattggcgagaaagctttttatcaccgcgctcggactcggacgcttggattaccctgcatgtgaataaattgggctgaatccttcgcctttacttggccaaggtccccagttttttttctttcggaaattatactccgtatacccatattccgtaggaatttccacttctcggaaatacaagcctgaatgggcaagccgttgatagatacgccgcgtcgcggcggttgtcgatctttaatttattataaaccgaggctggggaagtttcgccgcagataacgttgtgcggtttcctcttgtcttagactggggaggctctttgtgcgagtaaggaaccttggaaggttccaaggttcaatgtttcaacgttagcctagtaatttagtcctgacttggttccatggtagcatatttgctgtcttacagtatacgatatgaaagaagttctcaaacgagcaagtagggagacgcatctagattcgttaaatgctctcgcctccatcttaataggcattctcattgtcatcatcttttgggaaacaggaaacaccgactatatgataatgctggattggattgtaacagctgctccgaagaatttggatagcttgcacggaaagtaagttcttagggctaaaaatcaccgccttggctgtcaattgtgttttctcttcactcgtacgcaggttgttctacggagagatactaggtagagaacgcgtgtaatagttattgaggattatatttacaaaaatagtcggccgggtttgcggcctctttccttagttggctcgatggctgtccttttttcctacttatattctcccccttcgtgggtttttttttagctgaacggcagaaaaagattgatttgtgagctcgatctttctatatctaactagccctggattatggaaaaaatattgagcttagtctcaaacttttaatgcgaaatcagctagccacttgggttggaatcattcataggaaataatacagctcattaccaggaggccataacaaaaacatccgttcttgttaaggcccagagggaccatatcatagactgacactatgctttcgagcctaccttttttactaaaacaccataagcatagttgggcttacaagctcatgaatgacccagaaagctagttcacattcaggagctcaatacgcattttggattgggatagcatcagtggaaggactcatgtccctgtaatggatgctgaagttatagtgctgcagcctgctctattagaagacctgaccgaaatcttcggactcaccaagtaccatcggcttgactgtactcggcaggtctaagtacctagctcctccctatgctgtttgaagaccaagttgtttgattattgttccaatattgagccgataatatcgccgaacactacgcagttaacacatcaagacagtgcacttttggatcagcatggatgtcgtcgagtttggaggacatgatgaaagtatagtgaacttgatatactactaccggatcattgccactcaagtctctctgatttataaataggtatctaccaaatcagggatgctccttggttccctgtcaactgcggcccgacagtcttggcattgactggcttccagtggcttggacatgtcaaatgccaaatattgtgtaggcccacaatgaaatactagatcaagacatactcattggctatccaattcagctgaagaaaggctaagccacattctaagatgacaaggaagctgcgtcgatctgaaaccctcctgaggcggtgctcaacgctcagccccgcgagccccgccaatgccgtgtatttattgtcaggtcattcccagatctcaccttcctatccagttctcccaagtataactatacctatatatcatccgaccaaacatctacctaagaaccaattcttatttcctcgatatcaacatgtcgtacggtggaccctcgcagaatcaatacggtggtggtgccggttactatgaccagcaaggccaaggataccctcctcagcagggctattcccatcaaccacagcaaggatattacccaccagaggtgagtctacacacacgatataccgttgcacagaaccgtgtcacacagcgctcaaaccctcactctccactcgtactcgtaccgcgagcatacataactaactttccgcgctacagggtcagcaggcttatggtcagccccagtacggccaacattcaggtccttatgaccaacaaggcgggcagggctaccctccacagcaccagcaaggccagtatcctgcccaaggcagtcctggatacggtcagcctccccagcaacagcactacccgcaaagtggtggcggtgagagctcctcatactacggtggcgcacccccgcaccaggaaggacagcccggtgctgtaggaccggagggagaaaggggtctcgggtcgacactgcttggcggcgcggctggcgggttcgtgggcaataagcttggccacggcctacttggtactgcgggcggtgctgttttgggtgctgttggtatgaatatggcaactaataagctgtgagtgtccttcttatcattatatcttgtttgttgtcttttggatcgagactgactgttgatactctggtatagtgagaagaagcacaagaaggagaagaaagacaagaagcataagaaggataagaagcacaagcggaagagctcatcgagcagctctagctccagctcgtcctctgacagcgactaattggtctcttttttttgggtctgattggtcaccatgacttgttttatcctttacattttgtataccctgtcttgttctctgctgctttttccgttccggtaggttcgttttggcttctcgtcttggggactggagaacctgtatgcgttacgtttatcatatgcatttgtattctcaatgacatgacagctcatcaacaaagttgaattattaaatcaagcgattatgcctttattgctgacatatatgggaatgcttgttagctgcatttctgcccgacagatagccctttgtttcagttcgcagagcagttgaacattgtaatgactatggccatgagtggcatccagatcgtatgttattaaattggttaatattttgttattgaaagtcgccgcgcttcagcttcgccctagccggaaaactctttgaaaaaagcctctgggtcgatgctactgtccagatcgaacgacagccgggggacttcctttggtgaatcccacaaaaagcgccacttctgtgatatcggattccagtactgtcggggtacaagagcagacagacgtctccattgacgacgcataagcctgattgtaattgtatgtggtcgaccattggcatattcggcaaaagtggtacctttctcaggtcccctggccagcaacctgaagagctcgccaccagactcggtctggaaaacctggggctttgaatttctccttttgacaggctcccacggcacagttcccgatatgagtccctcgagcgtctggagatccttctctggcaatggcggaaggagactgttcaatgtgttgttgtaccattttttccgaatatttttcttccgacactgggccaattctctgccccagctgtcctccttaggaattggaggttgaaattgtttgattaacggcctgatacggactgctgtaaccactgggttctgcatttgagagattgcgagattcttcacgatagccgggggttcccagccatcactgaaatcaacaggctgggatattagctctttaagagccatggagtcattggggatttgcggcgttagaatttttgccagcagctcatgtcgccgtctcccagtgcgaccgtatgacagtaacagcaccttctcgagaggacgtgcatagccctcatttgctcgccgcagaaccgacaacgcatttcttgccgcatgaaccgcctgaggaccagccttcggggaacgagaggagacagcacgatatcgggagatgatatggtctttcatgtagttgcgagcgatggggtcaggtaggtaggtacattcgcgcagcgtggcgcgaaacaaatggcgccattggtgtggttttgagagattctgtacccaatgctgagattgcggtccggccattaggaatagcttatctgattgcaagaagtgcaaagaaaaagaaccccaaaacggaggaacgcgaaatccttggcgaaatgcgtgtcacgggaactccgacgcgccattttcgccgtctctcccccaaaccccgcgaacattgccttgccttgcattgagcctcatatcttaatactagttcaatttttactttgacacttcgcttcgttcggtcgctttctggctttgaatgttatttggtctggcctacggtttcccttcagagggttagccacgcgcctccttgagctcgcgtcattccaatcggcatccggtatctctccccttgctatgtactttaccccatcattacccgatttgtaggctgatattccctaaaaagcccagcatgtcgtactcacagggcagtacagggtcgaatggaatggcctacaacatgttgaatggttcccaatccctctcctccacccctcgcgcaactcctccgcccccgaaaggatctcagatgtcctctttcggttactccaacggaatctcacgaagctttggtggatatgatggaaccaatgagtatggttcggtaatgtcataccaggaggagtataaaccacagatttaccgagttcgtggtctatatccacacccacagagcatgccactgacgaggctcaaaaataggctgtctattctaatgttgctgtctatgaaatggaagtgaatggagttgctgtgatgaaacgtcggtccgattcttggttgaacgctacgcaaattttaaaagtcgctggtgttgtgaaagcgagacgaacgaaaaccctcgagaaagaaattgcggctggtgaacacgagaaagtacaaggcggttacggaaaataccaggggacgtgggtcaactaccaacgaggcgtcgacctctgcaaagagtaccacgttgaagaagcactccggccactgctcgagtacgatatgagccccgacggctccggagctcctgcgcacggatcaacgatagatacacccacgaaagagcaagcaatggccgcgcagcgcaagcgcttgtacaacggcggggataatcgcagcgcgtcgcagccgcagcagggaaccttcttccaaaacatctcgcgaaccgccgccaccgctgtcaatgccctcagcaaagcgcgcttcgactcgcccagctctaatagtcgtcggcccagcatggcgcgcaagccctcacagcagatgagcagccaggaatccgggcttgcattcagcagccagcagaccatgtacatgtccgacagcgggtttggcagcttgcaaaatcggtaccaggtgcaggatgacaacgaggatcttgcggaacctcctcgaaaacgcatgcgctctacttcacaccaaggcccccctattggtctcacccgagaaccatctaatctatctatgctcgaacctacaccaacagaacctaacgactcattctatcaacaagtggatcttcctccccctcctattgatgatggctcgaaacgcggcattgagtccttggcgcctgcttctactcccgagagattccagaagatgaagctcattatgacattgttccttgataaacgaacaaaagactttacgaatcacccggctttgttggagttgaccggggatgatcttgagattccccttgatgagtaccgaaacaatgccctacactgggctgcgatgcttgcccgcatgccactgcttaatgctttagtagccaagggtgtcagtatagcgcgagtcaatggtgccggagaaaccgccctacaaaaggccgtgggcaccaggaacaacctcgattatcgaagcttcccacgtttgctccaggtattagcccctaccattgacatggtcgattacagcggacgtaccgtcctgcaccatatcgccatgatggctgcgactggtggcggcggacatgtctccgcaaagcattacctggaagctctgcttgagttcactgtacgacatggcggtatcgccccaagtgcgaatggagatcatgccacaaacgggatccccggcggtgaagtcatgtctctaggacgattcatctctgaaattgttaacctccgcgatgatcagggcgatacggccctcaatctggcagggcgtgcgcgctcagtccttgtcccgcaactcctagaagtgggcgccgatcctcatattccaaaccatactggcctccgccctgcagattacggtgttggtgttgacatggtcgacggaaactctcaatctcaacaaccggctaatcggaatgactcatttattgatcaattggcgaaatcgaagaaagagatacttgatggtaaatatcttctcgcattaatcttcatccttactaacctgaaatacagcggcaatgtcccaaattagcgcactggtcgaagaaacacttgggggaattgaccgcgagttggcttcgagcttgacacaaaaacaagaaactttcgatcactggcatacgaagatccgcgagtctgcgaaggctcggcagatcgaacagaaacaatacgatgagctcaaacgcaggagttctgagcgcgtagagctagaccgacgtatcaagaatctggagcggtcatctgaggggctgttggtcacagtgaacaatacaccaggattggacgcgaccaagacggctgttatcggtgatgcagaccgagattccggtgttgatgtcgcgacatttgatgtcctattccctgagggtttcgacccagcttccggcttctcggaacagcaactctccttcctggctacactgccagcaacagatctgcttaggcgccagacacaatgctacaaagaattcaacggagagattctagctgaagtcgattgtctgaaagcaaagaacgcagttcttggccagaactaccgtcgcatggtgatggcatgcacgggctggacggcggaacaagtagatgacgccgcagagggcctcacgcaatgcgtcaaggaactgaatgacaatcccgtccccgaggacgaagctattgagattctgatgcgggatcgcgggcaggactggtagtttaaactgatgtgttgcattattctctgagcgtttaggcggcgttgcttcacttgtctacaaataccctgttggaatacatccatgcccgttggcacatgtcttgttatttacgagaaatgcaattcttgcacatttattcgtcttggctgtgtgtacgtgtaggctaaatgttgcaatattagccggtcgagttggctgctaggctaggtggcttgagaagcccatgttggttgccgagacatttagcccatccccgcgtttcacttgcttgcactttcggataaatagcctgctgcggataagtacttatagtcatgtgtagcacttccctattcatcattacaggcatcgttgtgcttttgacaattgccattacactattgagtacggagtactgaatcaagaatatggctaccagcttccttcacgtgaagggtgatattattgttgacggaaatggaaaggcagttgtgatgcgaggagctgctcttggagggtggatgaagtatgcaaatgatcggattgccgtatcattcccctgtcctcaaactgacatcccatcttagtatggagaatttcatcacaggcttctcaggccacgaagcccagcaccgcgccgccatgcgccgagtcctgggacaacagagatatgaatacttcttcgacaaatggctggagtacttcttcaccgaagcggatgccaaattcttcgccgagttagggttgaactgtctgcgtctgcctttcaactaccgccactttgaagacgatatgaatccccgcgtgctaaaggaatcagggttcaaacatttggaccgagtcgtcgatctggtcggtgtttcacatattcatctgcatgggggtagcgactaatctcgatagccttatagtgcgcagcccacgggatctataccatcctggatatgcacgctgtccccggtggtcagaacccagactggcattctgacaatcctaccggctatgctgctttctgggattacaaagaccaccaagaccggactgtttggctctgggagcagattgccgccaggtacagagataatccttgggttgctgggtacaacccgctcaatgaaccttgcgatcctgagcatgtacgactacccgcattctatgctcgtgttgaaaaggcaattcgcaatatcgatccgaatcatataatgtggctggatggtaatacgtttgcgatggaatggaaggggtttgacgaggtgctgccgaactgcgtgtatgccatgcatgattactcagtgagcttcacattcctttcgaggtcgtgagataagggcgttcttgttctaatacgatataatctctagtcaatgggcttccctaccggcgatcgctacaaaggcacaaatgaacaaaaagaacgccttgaacaggggtacctgcgcaaagcgcgattcatgagcgagaacaagacccccgtctggaatggggagttcggacccgtctacgcagatcatatttttgacttcgatgccgagactgttaatcaggagcgatacaacctccttggtgaccagctgcgcatctacgacaagtataacatcagttggtcgatctggctctacaaggacattggtctgcagggtatgatctacacgaatcctgcgagcaagtggaacaagacactcaagccttttctggacaagaagagagacttctggctggataaatggggccgtcggcctaagtctgagcccgaggcggctttgaagcctttgctcgagtggattgaccgcgttagtccaactgcgaaggaaacttatcccacgtcgtggaatacggagttgcatgtcatgcgcaatgtgttttacactttcttagcggcttcgtttgtggatgagtttgctgaattgtttcgaggaagcagtgagaaggatctggaagaactggccaggagtttccactttgagagttgtatacagcgagagggtttgaatcgcatactcaaggatcacgcacatgggtctcattgattctgagcaagagtcagcttggtatagcatactataataaattggactttcacgactgattctagtggcctagagcctggagggaggtggtgctctataagcagagtgtggcaatagtatccgttcccggcgatattccggcttctacttaaataccacgcactattgttatccacacactatcgataagccagaaaaatcgaaaaagaccgcggggcacattctcgacttcgaggtctttaaaggttactagagagatttgacatggctgaatctcctgcgtatccgtccaatctggacagcatatacgatgccgcatcatctctcaaagaccgcatcgatccaatccgattgacgtcagacaacattgtcccgatcctcaacctgcccctcactcacaaggtgctgggccacgacgcttcagaagagtcccttgcacaggttgcaagcggcgagatctcctataccaccttcgtcgccgatcaggcccgcgccgccctccggtctagcgatgacttgactacggaacaaaaacaatcgcaacttctgcatcttggactagcagccttgttcagctttctacagtccaacgttaccggtcctcccctcgaattcagctcggctgaagctgtgcttccctccagtctgcgaacagaacggacaaccctcaaagccgtgcgggcaaagatcatccgcgatctaacactggatggagaagctgcctacaagctcacacctaacccggaattgttcgctgtggctaaggctctgctagccgatgcgagtagcgatggaccacttgtggcaaagaccgcacgtatgcgcaccaactttcttcaccaaaaaatgctttcggaggtcacgagtacactccaggatgtgatctacaaggatgttgagatcctggacaaggctgagttgacctcagatgagagaagtcggttcctgctggaaagggccattattcatacacaccatggattcgatgccaaggcacgggaagatattactcaggcggccaaggtgcggaggttcgaatttgcgctgaccggaaagatgggcaagcgtacaaagttccaagaccgtgatatcagtcaactggtcgtgttggctaagagtgccgatgagacatcaccatcacaatcttcggagccttctgggcctaagaacctgaacttggacgacgacacccttctcgaggcaatatctttctccgaccaaaagcccgacgaacaatccttggcaattcaggataaggtttctccagctttggatgctattgatgccaacaatcagcctattctcaaccccgttgactctgctcttctactcgcactggcatctgccattactaatacctcgcctgagaatggtctcacccgagaggaaacaaacccctacgccattcgagtgcttgatggtggtagctccaactggcagatctatacccaagcacttttggtccgcagtcgagtagagggctaccgttcccgtactgttgagagagccgtgctgcagatgcaggctttggtggaccaggtcattgcggataccgcaaccagcgacgacgcagctcagaatgaatcaggcgaccctacaactttcctgccgcgccctgagcagtctgagtctgccccggccgctgacagacttgagcacatctggatcctagacttctcaacaagatggagtctcgaggctgagcttgcgaagcgctgggttgatcttggtggtctacgcaccgcacttgagatctacgagagactacaaatgtgggccgaggccgcgctttgctatgctgccaccgagcgcgagggcaaggcgaagaaactcatccgccgccagctttaccaggccaccggcccagatgaaaatgacgaaaatgaacaattcgaaggaccagagcggtcaccactaccagcagatgccccacgcttgctctgtatcatgggagatatcgacaaggacgaaaagatgtacgagcgcgcctgggaagtctccggggaacgatacgcccgcgcccagcggtccctggcccgccattatctcacctccacaccaccggaattggaaaaggccgagatagcctataagaagagtttgcacatcaaccgcctgaaccacggtgcatggttcgctctcggctgcgtgcagctcgagctccagaaatgggcagaagcaaccgacacctttacccgcaccgtccaactggacgataccgacggccaggcatggagtaaccttgccgccgcgatgctgcgcatgcccgactcggagcccgccccagagattatcgacaaggccactggcgaagtctccgccgccgaagtcgacccctacaagcgcaagcgcgaggctctatcggcactccagcgcgcagcgcaactaaagggcactgacgcccgcatttgggacaacgtcctgacagtcgcagcatctatcccgcccccggcaacaccattccgcgatgtgattaccgcgcagaagcgcattatcgagctcgtcggcacaaagcagggcgaaaagtgcattgatgtggcgatcctgagcatgctcgttgacttcctgaacgtggcgttcgagtacgaggcattgcttatccgctctgacgatccatctgaagccccgattgttcgcaccggtactattcccggccagatcatctcgctgatcgatcagaatgttgtcccgcttatcacacactctgcggttctgtggcagattgttgctcgcgtcgaagtcttccgtcatcggccgtctaaggcgttcgaagctcacgagaaggcgtggcgtgctgctgttgctgctaatgctcaaggtgctttccagatgggtgatgagaagccctggcttgagattgtgcgggctacagagaaacttgtgagggatgggtatgctaagtttggtcctatggaccgtgaagatcagaagattgagggtgaccatgagcctgagcttgttgcgaaggactggcggttcaaggctcgaagtgccgtaagaggaatcttgggcaagggcaaagaattctgggatggcacggaaggctgggaccgcttgaagcagttgcagtctgaggttaccgccaattagtacatatatcccttgatgctgtttatgaatgatatagattagctcgctcatatggcaggtgcaatgcttacaaaagtcatataccaagttcaacattattcaaattccctcatcttgattgataaatcaaggctattcatagtcacagctagagtcataatcttagggaatcattttgattccaactttctcttcaccatcccgcaaaagctctcgaacaagacagtgtctgtcccctgggcccagcgaactaaaaccttcacctctctctcgtccggtttctgtccccggaccaaccgtatctgcagacgtacccccagcgccacctggtccggaatcgccttaaatttagccgcaccctcctcgccggcaagtttcattttccgacgtgcgaatctcgaccatacattctcagaagcgaatcccgtcccggcagaacgtgtttgattccaggtccagaaccaaggcaacgaactgagttctgtatctatagtcgcagttgcagtgtcaatagacgtgccaggtggtagagtgaatgtgtaatctgcagggaaaggcaaaagactcttcgggcagcccgggattccgcgcacaatattctagaccagcggttagacatggcgcacaaagcacagacgtgaacgaagtgagttagaggtagtaaagtaggacttaccatggcaggccttcggtctcccaatgaccacgccacggcccagcgcttcgtcttgcttccctgctcgaactcggtgacggcgaaattggtgattccatgcttgatcagcatctctacgagtacgttgatactgctcaatttgccgagcatggatgtgtaccactggatgcggtcacgcagctggagactctcgtcgatcatttgcttcacgaaagccacttctcctccgtgagtcaccatttcaacttccgcgccggtgcaggtcttcatgtaagttagaacggtatggtacgtaagtggaatgtggtggatggtatatggctatttcgtgttggaagtgaagcagtaacactcaccgaaaatgggtctcgttctttctgctcagcagactgcttcagctcattaggcgaggcataaaagggtgggttgcacatggtaaagtcaaggctggttaatggtcaggtaatattctagcaagtcttaactggagggagactcacgtttggtgacctagcttttctaacgggaataggggtccgttggggtcagaatttacaatctgaattcgtgatctaagattgttcagagccacattatgctgggaggtgcggatattgttcgagtcgatgtctggttggtcagtggatgccgaatatcttcgggctgaaggacatacctgttgctacaaatttccaccgcggccgtgtcgcgcagcccagaagtgggtagatagcgatgcatcccgttccgcttgattttgtcagacatgatccagagactggagggactcattacttacatatcgagcccgacgacctcccggtcccggtcatactcctcatgcagtcctccggcggtggagtcaaggaggtcatgtagccagaggatgtagttgagtctatgctacatgtcagacatatgcgtataggatctaagccgtcattcgggatgacatacctatttggtacctaaaattaagtcaacacgtgtccgtcagaatatttttagtatctgcataccggtggacacagtcgatcctcagggatctcaactttcaggtcaaaatcttgttgcaggagggtggtggtgagttgtctgcatgatgcaaatcagatccactcccgaagttagacgttagagtcctccaacttaccggacggccgctggatcagtaaagtcaagttgtccgtttggtttcaagctgtattcgattagcacttgtctttctgttagaacagaggccttttcacgtactgcttggcgaagtcgcgcgattgcagccccaaggctgcaaaatcgacgtcatttttgtagaggcttcggacagactccatgctatttcgtggagtttctcagtttacttgatattatcgaaagaactggaatgtggccggtgaaaagcaaagcaaagtccacggcgcatagggaggccggtgttggcaagcgggtagagaaggcgaaagcggccatctgaaactttgaccgcgttgatgtattaggcagaaaaccatatagaacatataactatgacctacgccaatacatgtaggttccagactacataattgatctcaggaagaaactgatatagcaaccagtagtgacagaggtttaaaataaagaaatagcagggtctatggaagatatatggataccaattaagaaggcggaggggaacgcggtaggttgaaacgcaagttccgggtggctgctatcgtcgagcctcaccttacgtcacccttatacgggcatataacctcaagaaaattaaagatgccgaagtgagatgctacccagatgtagtagtatttgccattttgtaaagacgtgtatgaaataaaaataaaaataaataatcgccaaaagtatgagtgagaagtgaaaccatgtaagcaccgctttttactaccccaaatcgtcaagtcgtgataggcccaattatatacctttcccccttctattcacaatttccccccatttttccattccagatatatcgatcgttttcatttagacggagctttccttcttcaaaaggcgctcttggcgctcaagacgccatccatagccccacttcatctcaaccatgagaagagggaccgtggcgaggataatgccagcgagcatgacaaatgcaaactgggcagtgagagcatcaatgatagcctgagaagccgcgacaccagcagcaccaatgaagcatctcatcaggttgttgactgccgttgcactagcactagcaccggggtacaagtcgatgacgagtgtgctgttaatggtgaagatagcggtggagccataggcaatgaggaattgtaggataattgggactgcaaggtgtgtgcggagggatactccgtagacggcgacacagacaatgaagatagccgtgatccaccaagtgttgcgcatgcgggcatactcgatggggaaatcggggtagctctttaagctgatgcgagtatcgatcggaaggttgtgttgctgacaatattcacgttccgttcgcttgtgattgtagtccatcaggtatccgattgtatacgagccggccatgcatccaaaaccattgccgaggaaggtcaggccaacttccattgagttcaggccatattgtttttcgaataggtccgatgtggaggatgtcaccattgaccacactgtgtacacaatgctgccgaagagaagggtgatgaagacatccttctcgcatagaaaggcgaggggtgctagcacggtctttaaggtcaccttacccttctttccgcaggggattgaaccttcctggacgtctttctgtccgcaaatggagtagatgactggcttgtggatgcctttgaggggaactgtgccgtttccagcgatagagcggagtgtttcggggaggaaaaacatgatagacaaaagactgattccggatgcaataaccaagaaccagaagatagatcgaaacccaaggtattgagagaggattccaccgaatactggtccaactccttgtcccaacatgcgaactagatactgttagctcagaacatagcagtgtatccaagcagcaggctacttaccaccaccaaatattccaatcaagctgcctcgttccgctgaggtggtaatatcaccaatgacacccgcacctaggaaagttagctaagacacaagacagggatgattaatgtatcataccaattgagatggtggctgcacttccggcagcttgcagcgctcggaaagccataagttcaccatagttggtagagacagccaaagcaatgttcgaaataatgtatacactaaatgttccaacaaaaatcacacgacggcccaatgcatcagagaaagaaccccagaagctcggggcaagaccttgaacaatcatgtatatcgtgatagtcaaggtagctagagacatggagatatcgagttcctatattgccgtcaacaagtggccaaatccatagtgctcaagttgaccaacctttgcaacttctgacagtgcagggaaatagatgtttgaagatagcggcgagaaaatggcggcgaaagagacaataataaccattaacaatttgcgagaccgagtgaacacatgatatggtggttcttctggggcttgggcttcaagattgattgactctgctggtgtcgatgataccgagaatcctttctcatattcaggcgagagattagggcttgagttgaccgactggtctgtaacctcaggatccctgagggtttctgctgaactgtagtgggacaaagtcatggtgaataattattatagaatatgaagacaacactggctgttatcaacagatgcaaatcattgagaatagaatataaagtatggcttcattcggctcacagttttagaggtatagaaagctaaatgatagaatggagacatccttttgtatctcaattccagcaggaaacccctatagggcatattccaaaatacaaacaatattaggagacccatacatctgagagtcaaccaaatgtactccacagtgggttcgactaggggtcactataccctctccttgatagtagaaaatggcacggataatacttatctggtaaccccaatgtcgctcaatttgatacatacgggccacgatcagcagttgaaatactcgaggttctaatccacgagcttctagaatgacttacaccactagtctagacggctacatgtctattgtatcatctctagtattagaaatatgacttctaccccagggaaatcatatttctgatacttctgggagctacccacgagaggttggggcctggttaactatggataaatagttttaatacctaagttcatagggcagattccagtacccactgggattccttctagactccatatacgcgtaatggaatcgatctgcatataatatgcagcacgcaggtccggtttcactctcaagacttggagtcggaaaaaatatgtcggggaaatgttgcttggcactcgattacttttctcgattcaactccgcagaatctttcgtttcctatgttgtaaaggccccgaaagtgtgcggaattagggaggtgataaactagttaaccaatccactaattgtttccaaagcagcagcggatagatatctcgagtacaggaaaagagaagctgaaacctgatttctgttccagggtctcattttccccacgtgtcgaatattagccattttgataacatatatgtcaagcaaatgccaagcttcatcatttaccctggtcaatattgatacaggtgagattattgggcagaatacgccattgaattacgtgtgcattccccttgaccgatctatataggggatcttaacccttgctgttgacaagtcgtcaatcggggacccacaaagggggcgtctgactacagggcttagcatcacaatccaatgacatgcattatgattccagatatgtgatactgcctacaataccgagtacattacggagtataattcatacagaggccggtcagcttggcgatcatatcctgtctagcgcgaaccttgtcccgagagaaagtcatggacgaacttcttctcctatacatatatatctagcaatgtagctagctgcattggtcagtagcttgccgggtaccatacagtacatagagagtacaatatactaggtactgtgcaagcttttctacatagattatagcttagtctttctatctgactccactgatgcgacacccctagaaatcttagcggaaccgccaagagttcgtcgtcgtctgcggttgatcattgaattgcacatcgcttcgtaattgagcgtcgactttacactttcggggtgtttttttatctgcccaacctccagctcggttaaggctggccagggctatctacccctgtaaggctgatacagcttcccatcttggcagcctgatagaactcaattctttatacctcagttttgatgcccaatgccaagactctggtttcacggcaagaacggtctcctataatctactccgtactccgtaactccttcgctgctgcggatgccgattctcgggtacccgatatggactccgttagtgcacgttagatacatgcagtgtagttagtttcattagtagattggcctgacatggtgcaattccccacttctaaacaatattgggggtccaaaccctcaatgtgattaggttatagcttcattttcaagtctccgagttattgtggtgttgaacgcctcgatttagcatattatctgtcaacgttgtggccccaatgcaagtttttcttctttttcttctagctgtggaatagagaattggatcttaactttcgaattctctcaaggttccttgaacaagaatttctatacactttactttcaaatttgggagatatggtagatccccctgacaggtatgacaatcttcatctgaaacacagtatacggagtaatcatatggatctaacgatactagcggagaaaataaagatgattgttacgaacggatgaggctgtgtctgatctatttgcctggcgcttcaataaacaagcgctttgaccatgggatttgcagatctgatgcagcccctggctttcttggcccgctaaaggaacttgacacacacaagctaactaatataaatgataaaggattccagagtgttccacgaaggttttgaggtgatttaccgcaaaggaaccctagcatgtcgttatcgcatcaaacgacgtcctcggtgtcctccgtcaaactgctcatcattttgtcttctcccgcctaagtgtcctctattaacagcaacgttacaagtgcctctcaaaatgaatgtaatggaccttcttggcatcatgccgggtccagaacaaaagacacctcgtaagtttctttcataccccacagggcagggcccttcagaacgcccctgatcgtcggcgtatggagctcgtgtgtagatctggcgattgagtaagttgttcctatgttgtaactagttagttacatatggatatcttaatttgatagtactgggctgtggaaatgtttgtttcaggataaccacgctatatgatataatgcactacccccccttgtgaaacatgctaccgatattatagaagaccttttaactatttagacagtatctaatggcgttatataatcaccatggtttaaaccgaagaaagtgacctaattgtctatgtttaatagcaagtacacgttgttctaggatagagttatcaactctgcttcggatgaaagagaccacagagacatatccagccagttttggataaaaatatacaagatttcgcaataaccagtggatatatatctcacctaattacggatgccactagtcagtggaagtgtagctataaattaaatattgagatgcgcgagcgaaagttcttgacacggcatgattgtcaaacggtttattatctctatcggatagatatgtcgcacctctaattcttcgacggctggggatagaaaatcaaagcgagacttccattcaccgaagccgtccgcattgttgatcacatttaacgcacagatcaatgtatgcgcacaagtcacgaagtctcgcttcccaaatgaattgatcgtgctgataacaccgtgaacatgcagttgggatccggaaacctttgtaatccattaagagatcaacacgatcgacgaagctttcgcgaacgtggacttgaacatgaaagacgctggaagaaaggccgggagcacgtatatcgggtgaactcgtaccatgtcccgaccaatgacaaggtcctggtgcgaaatttcacgaaatgtatgccaaatcaccagccgatttggacgtgtgttgagtaacgaggctcggctcggatgatcgaagtcgcaactcacgatgcgtgagagatcaaggccggagcggacatggcgtgtggatcatgcagccatctatctcttgtgttgaagtagcgtgggtaggcaatgtcacctaacaatgggagaagaccccatcgcaaatatcgtgatcttagcgcttgtcccctctgccaccaccgcggccaccgcctcggccacctctaccacccccgccgcctctgccgcctcttgttttgccctttcctctcccacccatcatacggcgccctgacgcctggacacgggcgatgtcgtctttgttcaggttcaaagtgcctcctgagaacctgcccacggaggatccggcaagaccccgctctcttcgcccgttgttgctcgatttatgtaccttgttaggcttctcgaggatgatgccgttctccttggcctcttggcggcgtctatcttcctttgattcagccttggctttgatgcctcttcggtgcgcagtgggcattttagtttgcgcatagagcgaagttttggctccgagggattgcatgcgcatatccaaagccttcaaacggttctttccagtgggcgccagatcattggcagagtcaagaaggtgtgactccttaagcagtctctgcaatgcaagatcatgcttgaggtttgcagagtcgtgggcgtcttcttcttcttcttttttggatgtaggctctgggtcggcgctcggcttatctaagtcggacaacagttttccactctgtaggtctcagtgttagcctggcccttcaacgcattgaggcctagcacgtaccataaacgccttccaggtcttcttatccattctgtcttctggtgccgcgtaggcatccgtgtgttcgaccacctcaacttgattgctttcgtcactgatatcggacaccccatcccagtcaccttctgactcagagaaatcagagtcatcgtcttcttcattccctatttcagtagatttggcggtaggagctggcaaatcaagtggctcaaattgtgcttcgaatagtctgcggaatacgtcctgcgcattgtccactggaggagggctgtcttccttggtttggggcttagaaaccacagtggtttctctttttcgtttcacaaccatggtgaatgtgctatcgactaaattgtaaaatcgaacactcgcgtctcgacccaaaagtttttcggacttagctcaaagtcacgtgtgataagatacgccgcccctcgatttacacatccatcactgaatcaacttgttctccaattagccagaaaaaatgactaaattcagaccgtgcattgacctgcattcggggcaggtcaagcagattgtgggtggtacactcagccaggtggccgcagacctgaagaccaattacgtatccaagtttccggccagccactatgcgggattgtatcagaagcacgatttgcgcggcgggcacatcgtgaagcttggacctgggaatgaagaagcagcccaagaggcattgcagacatggccgggtgggctgcaagtggccggtggtatcaccgataagaatgcgcaatattggatcgatcagggtgcggacaaggtaagcccccggattccagacggattactatttcttcgcctgaattaggcttggttgagaactcaatgatatatatgcttttatttttacctatttgcttgcgcttcgtcatagtaagagtccaatgacgctaaccatgtggaatgcgggcaataggttatcatcacttcattcctcttccctgggggcaagttctcgctcgagcggctggaatcggttctttctgctctgggcggcgacaagtcaaagctgatcctggacctgagctgccgcagaaaagacaatacttggttcgttgcgatggaccgctggcaaaccatcacagagatggagatcaaccagggtatgtcctacctgcactgaacctaggctggttcttagcccactgacattatgtagcatcgatcgcaatgttggaaccatattgcgccgagttcctaatccacgctgcagacgtagagggcctgcaacaaggcgtcgatgaagaacttgtttcaagattggctgaatggtgtactatccccgtgacctacgcaggaggtgcacgccatttacaagatctcgaaaaggtccacactagtagcaagggaagagtggatttgacgattggaagcgcgctagatatctttggcggctctggagtgacgttcgatgaatgtatcgaatggaacaaaacgcattaaaatagaacataaatcaaaatgaatagatcaaaaatattatgatgacccaaatagtatattcctatatctatttcatcaaagtcgtgacaacaaacagcaaggaggagtacgagtcacagttgtgtctagacttgtcccaaaggggcttaggggcttttatcaactgaaggtccgcccgcctccgtcttcaacctcaacttctctgtgtactagccgagctgcgaccacctctttctccgacacagtacctatcccgctctttttgaagcactccttacctagcatcaaaccgccaacatgaagcccgtcgtctctgccttgaacgcctggtcttggtacgctccccatcccaatatccatcgaaacgttctatcgctctaacacctcgcttctcgcacagtgtcattatctctgctttcgcaatcatcatcctctcggtcctcggctcgctatacagcgtacgtctgcccgactctcacttacccaagacccacgaagacccattgtcccggacatacgtaatatggggatcagccgctaacgcgaagttcccaactatagagcaacaaccacgcatacaccggatcggaaggcgaacctgaagatggccccgcagtcgccgcctctatttatatcgctgtgatggtctacgccgtacgtcactccctaaaccctaggctccaagctccgacgagatcgttcgttgcatgagaaatgaatcggttactgacaatgcgcctctttggcttacagggcttcttcgttttctgcggtctccaggcttaccttcacatgcgagatagtaggggaggtgctatatcactgcattaaaattaccttggttactttacattcgatgtcttctaacacgtttatctgtcgattttcaatctttgagcttatatctcgggattttgagtacaacacggtggcttaaattttatgcgttgggcgtgatgagaccgagagataccctaattctctcgagtatgaatcactcatgttcactctgtgcgacccagattcgtctatgttacagatgagcaggatcagactaaacttgaaaggcgttggcgggcaggtttcccggtctcctttgctagaatacacagatagccgacctgcgacttgtacatagagcgctcataattatttccagctctttgatatttctttttttttttttttcgcccattagacggacgcatctaaagataaattttggtatagacattcaatcatttgtccttcgttgagaaatcaagttttgtaagaccgccaacgccagtgaatgcataatcagatgccgaggctcagctggacacctgatttctttttcgttttctttctcgttttgtttccctccaggttattactcctcatcctcccatggatccaacatcttggacatgtaaggaccatcaaggtagtacccgagacgagcatagtagctacgcacacccacaccggagatgacgctgatcttgcgactaccgtgctcctcgcgcgcaatacgctccgcctcctccatcaacaaagttccaaatccacggtgctggaacttgcgggcatcacgtccgtgaagcggcacagccgaaccatagacgtgaagctcgcggacaatactcgtctgctggccagtgaactcaggacggaaggtgtgcgtctcactgcacttgcgcagacgaagcaatccaataagaatatcctgcttcgggtcttcgtatgcaaggaaagtctcccatccgccattggcggtgtagtcacggcggatcaactcaatctgtgatggacgaatcttgttcttgacttcgttgataccgacttctcgcgtgcggacatcgcggcaggtcgtgccaaagtccttcatacgcgccaatgccagttcacgcaagttgccgttctccacgccggaggtgacaagtggcatggggatatcgcgctggactcggtagatacgggtccatgggggaactagggcgagaattcgtgcaacaaggtcaatgagtgcgttgggtgtgtagttcttgtaacggccggtacgccacagttcgtagaggccggtgccgcggatgacaagagtgggatagagtttgagaccgtcggtacggaagttggggttctcgaagtactcctggaattggaacagatcgcgctccatcccaacgttcggcaggtcgggcatcatgtgactgacaaccttgaacccggcatctttggcaagcttgaacgtttcagctactgctgctacggtgtggccgcgattggtgtctcgcgcaacgtcctcgtacagactctgtacaccaacctccaaccgcgtgcaaccgtagcggagcatgctgctcagatgtgtatccagacagtaatctggccgagtttcgattgtgatacccacacacttcacgttgctcatttcgcctgctagcacggcctcgtcaacattgtccgtttgatatccgctcagcgcgttgtgaagctgggagatgaaggtgtcccggtaatcttcgggcagcgacatgaaggttccgcccataataatgtattccaccttgtccacactgtgaccgagagctttgatttggtctacacgtcctcgtgcctgctcgaacggatcataacgagcgcggatcgctcgcatcgaggtcggttcatatccagtatatgactgagtggagtattcgaagtcggagtctgggccaccggggcagtagacacatatgttaccggtatacgcgatgtgggggcatcgatgaggtttgcacataaccgccaccacggcgataccagaggaggttcctatggacgaggttagcgatagtccaacaccctcaattggaaaatttaaacgtacggattggctttgcgattaactttggtaagatatatttcttgtagtgctcaggcactgccgcgataatggccgtcagtggcggcgagctggacaagctgtgcttcttcgaaaaagtagcccgcaacttgttgagattgagatccttcttgggcttggtagagtctcggtttgactcataatcttgaatcagagcatttgcaatgtcggaacaagctcgcatgaatcgctcgttctcaggtacgttctttgcgttcttcttggcggctctcttgatttcctgcgaggtcatagtcatggtagccatggcgaagagaataataccgcgcctaggcgggaaatctttcaaaaaccaaaaagcacaagttggttatacttagtgggggtgaggttgattagatcgaaaaatgtggtcaccgaggtctgcgcccgaagtctgatccgcttaagtaaaataaattatgccgagcgaaaactcccgggtgtgtatcccgaacaccttgcccttcatccccatacttttctttctttcaacttacgtcttatacctcacctctcctttcatacatacaatcttgcagaaatgcaggccttccgccgtaacaccctctcggcccttcgaaatgtcggtgccacccagcgtcggactcaggccacctctgcctatagcgagaccttgaacaaccttaagatcaacaaggacacacgtgttctgttccagggcttcactggaaagcagggaacgtgagtggaattcccgcgctctcattatcacacaagtataatactgacatttgagcttgacatagcttccacgcagagcaggcaatcgcctacggtaaacattcatccaaccgcgatcgcatccaaacaatagcttacacaagacaggcacaaatgtcgtcggtggtaccaaccccaagaaggctggcagcatgcaccttgaccgtcccgttttcgccaacgttagcgatgccatgaaggagacaggtgccacagcctcagctatcttcgttccgtatgatcacacctatgctctccaaatatcaggaaaacaatgctaactacaattagtccctctcttgctgctgctggtattgaggaggccatcgccgctgaaatgggcctcgttgtttggtacgtggccgacggagcttccccttgtaaacaactttatctgacagcttctcgttcaacagcatcaccgagggtatccctcagcacggtacggatctatcgagtaccaattgaagccgcgaactgatcgatttatatagacatggtccgcattacggacattcttaagacccagaacaagacccgtctgatcggtcctaactgccctggtatcattgctcccgtaagctaccactccaactttctgcagtcattcaagcctcgccaattactcacgcatctcgttcatagggtcaatgcaagatcggtatcatgcccggcttcatccacaagcgcggtcgtgtcggcattgtctcccgttccggtaccctgacctacgaggccgtcaaccagaccaccctcgctggccttggtcagtctctcgtcgttggtattggcggtgaccccttctccggcaccaacttcattgactgccttaaggtcttcctcgaggaccccgagaccgacggtatcatcatgatcggtgagattggtggttccgctgaggaggatgccgccgagtggttcaaggccaacaacatccacaacaagcctgctgtttctttcattgccggtatctctgctccccccggccgccgcatgggtcacgccggtgccatcgtcagcggtggtaagggtggtgccgattccaagatcgccgctctcaccgatgctggtgtcatcgtcgagcgcagccctgcttccctcggcaagacccttcttgctgagttcgtcaagcgcgaccttgtctaagatcgtcgctcattttcatgcatcgcgtgtcttgttgttctggtttttaagccggggatctgaggtatatgtgccattttatacatggggtttatgggctgctcctgtattcttttttcctttgcgatagagatccttgaagtaatcatgctcgtgtaattattactgtctgctgtttttatagagtagatggttgaaataagtaaatatatgggaaccattcttttcaagtccgtgaagcaggcttcttggacggtccctccctcactatccacgactgaatcctcatacagacatccatagtaaaacaaatgaacttataagccagcacgaattgtacagaagagcagccgccatgcctcgtcaccgcagctagctgtcccagttctcgaataaagcgagatttgatgttagtccagtatgagccagggaaaggaagcatcgactgcaaaacacgcatcctgtcgcgcgctgactcactgtgctaatctctttcctagacaagtccctcgagaccttgtcgatgcggaatagcacacgcactcgagcatccagattgatagctcaatgtatcttagtgacacgagctctagagatcaagggaagcattcatagccttgaactaaagtgaacctagggagactaaataacgaaagaagctattatacctacaataggggggttgtattctttagcttgttatcgagattatttgatgagtacaccttttaatattttcttgtcctagtcggagagggtgaatataaaatgtcgaagcaagaacggttcaacgcgaaggctattgatatgtttgagattgtattccccggggccaaggctggtgaagagagaaccgagtccggatactcaagggggacgcaaagggactttgataaaatacataccatgactacttaatacggtaatattcaatacaatacagaccatgtaagatctgtagagaacaacaattccctaagaagattcgaatgtatgaactgatttatcaacatgaagtaaaataaatatccagtgaggtaccaagtaaccgagagagatagagatggagacacgagtctattctacagtaaaattctatgagagaaaggtagactgcttttccaacatcgtattaagcttctcaaattataccaaattccacatgtgattgttttccccaaagaaacctagaccatgctgctaccctctgatactcagccccgaagagggatcatcagtctagcaagttcggaagaccactttctatcttgataggggctacgtcccagcgactttttggcttctcgggggccccgttctgaaaggttgatggcacacacagcttaccattcgaaagacccggggctggcgacgaagaattgtcattcgataatgtctcacgcagacatgcaaccggaactttcaataccacaatacggttcttcgcttgagagccctcttcctcgtccatccatctcttcagggttatataagttcggcttcggccaaaattagcgcgatattctctgacgaatctcgattggttccagttttcgtgtaaatgagctttcatccacgcagcagccaccgatctctcttgatggtcggacttgtgatcggtccttcgcggccttctccgtgcttccgatatattgatcgattgccgccgtttatatgcacggggacgtaaattctcattctcaaagagcgtattgcatccttcccgcgggggacatctcgggtgtgatatgcgcatatccagctcgggggctttttgcgaggacctagggtccatcggaacggcattcccagagattgacgatagatccttcaagtgcatggggctcactgagacggctttttcaacgccttctggcagagaaacatgagatgttgacataatagcttcatcttctcctgttcgagacatcgaagacgaagttctcgagggcaaagaatttaatggaacagccatgtcaccagctagtgcggccttgcctccattattagagtcatttttcgtctgttgactggaactgtcgtctcctgtcccattttcctcctcggggcctttgttctctaggaccttgtactctgacatttcgtcccctgtctcatcctcactcgagtcttcagatgaactgtcgaaactcatgtcgccgtggtcttcggaagccatttccgatccgcttgacccattcagcgggcatgattgtgccgaacttgatgcacggagtctctctgggaaaaaagcggcctcaggctcatgcggtgtcaaatactgtgcctggtcacttgttggggtgggataagtcgtgataggatctccgaagggctgaagctcgctcaggcgtatcatcagtttttgtttcaacttttttagacttttcctatctgttacagtcagattgctgcttgcgtcaagtgtatgagtaggtgggagtagtaacattttgactcgtccttttcttcagcggtgacattatttaatatccccaaagtgatctccgcctccattagcgaatctgcgctgcttggcctcggactggaaatttggagggcatggcttcggcaaaactcgactctgtcgtgtacttgttgatcgaatttaagtactttcccctgaatggagcagtggtaggttccatcattttgtttctggaaatcgccgtgacgaacaatgtccaaccaaccaatagatgggctatctgcgtctttattccaggaagagggatcacagcccatatttatggtcagcgacctttccaaatcgtaactctgtagcggctgtttcgagaaatgctgtgtgaaggtctgagctgtctggaagacctcttcataagaccgaatgaagtcgcggcgatatgactggaggtcttcgaatcgtcgtattgggatgtctctccgcgacccccagctaatgaaatactgagagctatccatgttgttcgtctcaggcccttttgaggtcagttcaactcctcatactcggtgtctttctcatacaatacagtaatttgttccctctgttgctcataggggtttcgagggctctggtattgaaatatgacttttcctcaaaacagtttcaaagcggatatctgggtaaagaaaataacgcaaaggagaagggaaagtgttaaataataaattttagggtttctcgtatagcgtgtacggcgccgcactgttatcggcacccttataccctggtcactctggtagagcctgcatttcaacagacacactagagaatcgaaacatcgagtacggacatacgacgccccgcacttgtgtgattgggttcaaaggtcccgttgcggtgtgcccaccattacatccttgtcatacaggggtcggtttcctggtccgcacaggggtcggtttcctggtccgcacaggggtcggttttcaggtctgcacttgggtcggtttccaggtccgcaccagggtcagtgtctagatcgcagttttgggggctatctacatttagggggctgggagcaaatctctgctcctccgtatatgcccctcgttccgtacaaatccaggccagcgatgttctctgaatttcttcttgagcacaagtcttgacacagttttcctgacagaagtgtgtgtattccgtcctccgtatggagtacggcttcgcactttccgcctcttggctagattcattggtgttgttatcatctagattctgtactgccctatgattcaaaatagccgtgtttgacgcaattattgtgccttatcaaccgtcagatgtagctaatagaggcactttttacgttcagcttcattaacatatcgcgacggaggttgcatgatagacagagattactacaacataggctccaagcgtggtatatactacagcagttgtaggtctcttagttgggacttccgggtgactcgtggttttattagcgcagttttttctttgcaccatgtacttggctaatacttattatactaatgtattgtacatccaaggctttttattagcagtgcagctgatgctttccctttcgatttattaatttctcccttttgttgactttcgttgactttcgatgatcatcttgggcaaactttcacaagtaatatgccgggtataggctagaagccacatgatggacggcctaaggtcatagcaccgaatgtatacactagtggcgtcgcggtccctgcagacctaggctgcctaacgcacccaaaatgtacgaattcttaatgtgcgacggtcaacttgtcacttgtgtcgacgcagggaagtattcatgataccaatcctagatcaataaaggaagagagcaaaatcgttaaaagtcacgatatgacacgtctttttcaagggctataactagcccaggtgtaactctgatttgtcgatgagcagatggtactttgataatgcagtgaatgagatgaaattaggcgaaaagtaattctataattatgaaacagaagatttttttctaaaaggtagaaggatcgtacttttacttggaaaaatacgaagctgtcacatcacaggaatttggcggtttgataatgtatggtaccatacagtggtatgaacatgtaaatgacagtactgagaatttcaacttggaacggacatgctgacaaattgtaatgtatcgggacctcacctgcccggggttgataagtgagcagagtgagtcaagagacgagtgagtcacctaagatagtagtataaaagcttttgaagggattcgaattcaccactaataaacatcaattcagcatttggagtcctaaacaaaatgaaatcattggaatttacccttcccacggctttgatactgatagacaaccaatcaggcttctgcgatccaaagacaatatcttccacgctgctggaggtaatccacgtttttcactcctctacaactccggagtctccgttccacccttccaaccccgaacagggtatgcgtcccctagacttcgctacccctgcctcagatgggtcggagccggtcttttggaaaagtgtcaattcgtcttttattgggactggacttgaggcgcatttgcgtgaaaaggggttccgtcagcttatcattgctgggttgacgactgatcattgtgtttcaactactgttcgaatggcggctaatctgggggttgtggatcggtatcttggagatggacctgtccggttgagatcggatgggactcatgagaatgacttgaaagttgacaaggggcgtattgtccttgtcgaggatgccacggctacctttgggaaggctggaattgactcggagactattcagaaggtttctgttgctagcctcgatggcgagtttgcagatgtattttccacagaggaggtcattaaggctctgagcaagatctaaagctagcgtgatagtgctgaatttagtgagactactacatctcttccactcaagccccaactattttctactccgtaaatttcaattatttagtcttcttctcacttcaggctctatttcctggatgtctacaatgtctacgagtcacatcacagaaacctggaccgacagattgtctctctcatccccgtgtacattgtgcatatgaacaaaataaaaaatatcaattagaactgtgtggcgggttgccactacatataaacatagttgcctttgtcgtggacaaggatagatcaggtcccagggcgcctctgggtcccagccccctcgcctttagactcgggtcaactctcgcaactcccccaaacccctcatcttctcatccaaccgcctcgtccctctactcctcctcgaattcccactcacagtcactgaggtcgtggctcacctcagtgctgtcaccctccgtgtctgatttcccccccatgtcactcagacactcatcctcgctctcctccttaaatcggagctcccacttctcccactcatcccactcatcctcttcatcgtcctcgatcgttggaagagggatgggttttgaggtgtccccatcagtgaggggccatgcccattggagaaggccatccattttgtcggcatagtcctccgcgtcgaagttgagtgctggggtataggccactttgagccggccattgtcgaaatacccatgcaaaactcgaactcgagcatcggggagaaatgagatgaccattgtctacatagatgtcagtcagtcatacattgtctatcatttgatggagcgtctagactcaccgggaagtcaagttggggccgctcatgtcggtggtacttgccgatttggtgcttgtggttctggattccactaagcatccatcgaacaagtactatgagctctccaactgaggggaaagtgtcatgatagcattcttcgcttgtcatgacggcgagttgatgagcgccctttccatcagcatttacggctcccctttgaacggtgaagccgtacttgtcgttgctgttgaagagacttttgtcttcttccatgctatattcgtcaacggttagtctcaatctgctttctatctattcttggggatgtagacttacgggatcaggtcccagtaaatgggggtgttactgcccctctgagatttgcggaggtacttcgaaaatgccttatagagttgatagtgcatctcttgggggacgaagtcttgatttgtcttcatcgcccgaacccacgtgaacgggtcgtccacggggtcctcggggtcgagagcactattggcgattttgaaggtggtgtcggtgtcgggtgtgaagaattggatgagggaacgatcggtattccccgtccagaaatccatcgggtggatgtcaatgttggaagcctgatttgggatataatcaggctccatgtggaggagctctttgtggagctgccgaaggctcttcttcttctctttgaagagccaaacccagagtggaatacgacacatcgtgaaaccacctggggatgaatgatgaagaaagaagaaaataaaaaggaagtgcagagaacgggggcccttttatgttctcccttggtcaaatcctggtctgcctccgacatccaagactatatcaactatgcctaaataagatacgggccaggttagacccatgggttcatcgcgtatctcaacatagaaagcttattcttcggtgctggactgcttcggacgccatattgggtagcggatagcttctgcttagatgtgtaccaattcaacaatatatagttataaatcggaacacagataccatggtataggaaaccctatattctccgaattcctttgcagtatctaaagttacatgaccattgatagatagttgatcagagaaagatcagaacaagatgaggctttagtgaagtaacgtgtatttcatagtaagaaggaagtgaaactaatttgaatgccaaatgccacgcaagtagttgtgtggtagaagcaaggaaggaaacagtttatctagaaattggaatatattgaagcgtgacggaaaatcatgcagcgcgtaacagaacccaaggttcctgttcaaggcctagatgggccatatcccattcttgacaaggcggaaaccatgtaggcataagcgcaggcggtttgctctaggattttgactggctaatcgcaatatatggccaaatgattgagcctataactcaccggctcttcattttagcggctgttgaatccagaacgcagactgcaatggcctttttctactaaaccattttgagcgtgatagttttagacacaccatgagtcggaggtccgggccgcaaccattttaagtaattttgactacgggcgtgtgcgctggctaaatgtttcgtagctgctcgtcttgaaatcattcatttcgacaactaatatacgccatgaatcctgccgaagacaaatccgcgcctcaaaatcccggctttgcccaactgggaatattcgtaaagctcccgcttgaacttcatttgacgatagggaaatatgtcttgggtgaaatacatccagcctctttcgctttcgctttggctgttctacgttgcagttgatatgtctatcaaaagatagcagatcggcttttcagggactttaaacatgagtttcgagttgcgggtagtggattgagtttcaacttcactgtcaaacaaacgcgcagccattcaagccgttcacaggccatcttcacacttttccttgggggcgagggatagaatttgggcctctatcttgtaagctggcctcggtctgtatagcgcgtcgtgggaggcaataagcgggcttctacgcgccttcggcattccatttaggccatgccgccattcatgcgtacaacctaccctgtaaaataacgaggtctccacaatctcttcgagtgtacctaagcgtccccgcgggctcagattcttcatggcattcagcacgggttctggcttgcctggtgtgaaaagctcagtatcggtcggacctggggcgacggcgttgatggtgatttccttggggccgaggtccttagccagaacgtggaccatctgcttgacagggcccttagaggttaagtaaatgagatagggatggccaattgtggaagcgtgacagagagttgaggaaagaagaaagattcgggcgttggggcggaggtgagggagtgtcttctacaatcatcaaccttcagtttggaggacgtgggtgatatgggtaaacaagctgagatcggatggcacaatgaagttctcggtaacatacgctttttgaatgggccggtatcttcctaggctcgggcatctgcgcttctagtgcttcctagtctaaaatataaattgagacttgttagaatagcacaatagaccaatgttgtatattagtggctgtggctattcgtggatacgtattgtagttaacatatagcaagcactaacaatagaagagtggccaggttacgtctccacgatctaaagtgtgatcgaccataaagctacggagtagtgatagcatcaaaggggtcaggttcactaggaaacatctactcgaaccagattatcatcgccagtgatgcagaaagcgctccacatcctgcataactaactgcaacggtctgcgagacctgtcctggttctggcagacagttctttgacgaagctggctgcgagataggtgcttggataatgtctgctgtcttccattcttgaggtatcgaatttggtacattcgacagtgactttcgcgtccaagtcgcgatgatatgttgccactcgggcatgggaggcctccaaatgtctaaattgcggaaatcagggtctctaaagaccaacaaagcattattgacggaagcgaatttcagcacccattctagacaatcggaagtataaattcccggccccagctcattgtccaaggaactattgtgaatgaccggggtgaaaaaagccatcatcgcagctaaagctgcccgagtagacactcggtacaaaaatgagcctccgccgagtttacttaaatagtctttcctaatcttcgtggctaggcgatccttgttattatcccctttgactcgaattgcggaaatttcctgcggcagacgttggggtctgttgtcaggaaacagctcctccaatctatgacaggcgtattggtatccaacctgaagtgggatgggatcaggccggactggcataacaacaacaggcggctgattgtatccaaagaaataccgatcgtacatcgatgctggaagtttgtcctcttcgaacagatgctccaagatccatcgtacaccgacatttgttgggatgagtcgcacctcatcttcgagggcaatcgctgggtcgttaattgcatcgaccagctcatcaaggcctgcgagccaaaaaatgctactcaatgggccgatcagttcatcaaatcctaaagtcagatcagcaaaatatcctctagctttcgccaaaatagatataggtctgcgtacgatagctattgctgtcaatgtactctccgatatcctcggggatcgttcccgggtatccatgctctcttgaccataccgggcggaatcctgcttccgccaactgacccattgtccgagcgagtttattccgattgtcggaggccatattctcttggataatgggagttgtaaaggggggtgttcctggcactatgctggctgatgaggaagttgagtatgtgagagatgggatggacgaaatcgaaggtatagaatcagtcggactgattgatgtggctgggctgcttgccgcagctggaaacggaaagctttcccttgggtccatgacttgatcaatgaattaaattagatcgcaaggagttgaattggattgcccgaattccattctaatattcctggatatatgcatagcttcgctcttaccaaaagcaatggcacctgccagtatatccgcatcttggtattgagtacaaatataagaagcgagggtcaggaaactacatgtgtagtgtttccctaccgaaaaaggagtcggatcttaacaccttaacatggtatcatggtccatggatcccccccggcttacgcctgacagaccgaagtctgacccatacctccggtgggtcagcactccctctatagacgatgtataccccgacgggttattttctagctgtagaagggagtcgatgacctcgaatctactgttcttgcttccagaagacaacttctgatgaaggcctacgaaattctaacaggaaaatagattccactggatggtacttaattctacaagaataatactgaagtctctaatactattcaggcaaaaggatagttaaacgaggatacggagaggtccttattagggtaggtcttcaagacggatcgacgtatacttcccttacaactagtttctatagtcctaaaggatacagaaagctctttggtataaataagctccttaaggagtaggatatcctacgagatacgtccgaagcgacttataaacggcgaaggaaaagtagtcggattcgtagatacttcctcgggagtgctatacctcgtcggtccctcggaggagaacgctagaaaattgtagtccttaattttttcgctagataatcgtagtctctgctttctactagaaaattgtggtctctgttttccgccagagttccctactggtcgggtggctggtaagacagtcacctagtaggtctagatccgataagtagatagatagtctcgtcccacgtcccttttctcccctcgctatctatcctatttctacttgaaatttacaattatcatactagctacctagctatttctagcggggagcagagaccacgattctctagtacaaatacctcgggtgcctaggtaacctatgggtacgcaggtgtatagcggccaacagtcggatgcctgattttgatggttttatggcctaattgggactagctctgataattttcagaccgcctttgacaccgcccaataccatcttttgtaagtacgcattgaagagacgaactaagctgtcagcattgggtaattcaaatgccttctaccccaccaataatgaagctatttcaattccgaaaaatgcattcaaacactggatagtaaaaagtattgagtaaattaaaagtgcccggtaattgtaaagggaaattgggataaacaatagaattcttcaataaatgcgacgccattcatacatctcggcggcccagataaacacactcctctcctacgtacgtcttccattcttcacctctaccactcctgcaagcttactctgaccactagcttacgtttctctcgaggtaaacccccatatgcctactactctatcgcagagtctgaccgatcctgtctagagtcgctatttgcacttctcgttgcgctatcctccgcgcttttctccgcgctgttcttcgcgctgttcttcgcgctgtcatctgccttatccgctgccatgcctcactctatggcagatacgctcgctctccttacccgggtcaaggatatcctattcggaatgctagaggttatcatcgctgcgaagagggtcctagaggaagtcaaggggatgcttctgatagctaaggatatcgccattatcaccggggagctattggccgctgcaggaggtctcttctactggggtcggtgggcccaatgggtacaggaggctgcgcgctcctggctccaatggacacaagctgttgagcattcctggctccaatgggaccaatgggctgagagtattcgatacaaatggatttatgaatgtcttcttatactctttattttccaatggagactagtaattaaagtaaagatccaattaatcaagactaaaaagattaaaagcggtaacccgattaggccggttgtcgtgatggtcctacccctgatttctctcgattttggagctacctaactgccctttatgcctccaaggattgatctcgagccttataaaggcgagatcattgatcttatctctcacaagactacccatgaagatattatcgctctccttcaagagaaatatcagattctcatcggtcttactactctcaaaagccgccttcgagaatggcaatgtccagtacgcactcagaaagccgatatccatgatcttattgaagagttactccctcgccataatacacaggatatactgaagattctagccagagagggcacaccatcctcagaacggactatccggagggttcgggctgatcttagtatcaaactccggctttctcccgaggagcgagagcaacaacgtgatgatatcgaagctattctcatttctgagagtatcattagcgatattgaagactttgggcgccgtactctacatcgtcatcttcgggcaatgggacaattttatactgagtactactccaacttttgggaagcctattcttactaaccattattatacaaataggaaacagatctctaccatttacagactcctccgtcccgacgtaattcaaggccggctccctggccaaaaacggcaaagacttaattatatgtcgccagggccaaatgatgtttggcatattaatgggcatctgaagcttgaaccattcggtattgagatttatgctgcaattgatggctactcgcgctttattgtctgggtctacatcggggtcagtgtcagtaccgcagtaagcgttaagcgccaaagtctcgatgcttttgcggcttatagcttccaaccaaggaggttccgctctgaccgagggacagaaactgttcttcttgctgatacgcaatatgagctccgaaagctaggtgatccatcagtacagatcaacgattgctatctctatggccggagtatggataaccagcggattgaggcatggtgggctattttatcaagggcaagcactggcgtttttcgggtaggcaatgatgatagtactatatgatactcgctgatatctatctaggattttttctggagcctcgcacacgataacctctttacgaaagactgcattcccgatcagatctccctccttgcgatctatatgccgataatccgacgccgagtacatcaatataccgtgcactggaaccatcatcctatccaagcccagcctcaacggccgcacgttatccctggaaagccaaatatgaacttctactactctgatgtaccggaccttcgctgtccaatcgataccgatccagactcaatgtcagaacaggcacagctattccgacatctacaacaagatgtggaagggtgggatccggatgaatatcttccaccgtctacacttgcctggtgtcagcagcagcttacagaaattggacagcaactagcggggatgccctttaaccccgaggatccgaatcctggcctcattggggatccacgggccccataccgagcggtgtatacagagctacgggcgcgagcgtttgcgcattggcatactggtcaagatccaatactcagcgtttatacgccaccgagaggtgcagctaattggcggccggataccgatgtctcgggagtcccagagagctagtcattactagaatatgggtagctttagtaaatgatattatttccctaatcttctccttttatcctttatccatccttcatccatccttcatccatcctttatccattctctattcatcctcgattttttgagaatggccgatcttgatcccaactttatagcgcggtttatgatcgcttggcggcaagtaaactcagctacacctccctcgagtgcacctccctcaggcgtacctccttcaggcgcatctccctcgagtgtacctccctcgaatgtgcctccctcaagcgcgccgccggcgtatgcaccaccagcatatacaccaccagcatatacacagctgttcacctcgggccagcttacaaatactccattctcggcgctccacaatacagtgagcagtaccaggcttggatacaatcggcgccagcatcaacaaggggtgataggccagcaagtggcggagcgggatatcccaattgcagtgaacttctatctccaacagtctccaggagagactgtaccaatccccaatggtaacatatctcttctttaataaccaagcaagccaaagctaatttatctgaaattatagcctcgatgctgattaccctccctccgactcagcgaatcggctttatcgacctttgggtcaggaatacgctattttctgcactgcccggaattatctgcttcagacctcggcttgaggataagttctaccttgctgaggcgatgattaagggcgcaggtaaaaagctggttcctcgatggatttcaggggtcgacgctgagttcgagggcacggtgaaggaattccttacaaaggttccagcaccaaaactacatgtggttgtcgcacggtatgaaggcgcaattgataattggccggactccaatattgtggtacgttcagctggtgaggccgaagaagtttcccaaacgcctctacccagctcgccgtctcatatatggataccacctcgttcattcggatcaccgcctcctgtcgcagttatcgaaagcccaacccgtccgagggcaaggggccgaaagcgagcccggccgcaggctgagggcccttcgccacgccggagccagaggatacggagagtttgaggttcatacggctggcaggaatgggaactttatgttgaaatccagacttggctttcgaaacgttttgggctttggtgtcagtggcgccagcagtttttctccggaaagtgcggagctcacttttcgaactttctgcccttggatgaaatcactcaacgtgttgttgtacgttccaatattattggaaccctctcaacacaagccgagtttcccctcatgtatttaaaggcctgcaaccatttggagaatatactggtgtttactatcggaataacctcttcagtgcgtaagatacacaaatgacgggattgtggcgggtgtgaatggcttcaaatgcgagagattcatatggttggagggggtatgaatagcttcatgtttcaactttcaagccgttctgaagaactttggtactctgctgactaggagatctgtcatggtaattcaggtattttaattttctgccagtctaaaactggtatgagctagtcctaattaggcaataaaaccatcaaaatcaggcatccgactgttggccgctatacaccttcgtactatgggtacatattcccgcctacattcacgtctcggcaaggtatattatattcaatgaaaaatattctagataactgctttgtgaatacagaaaatcaggaacccaaaacatatctatctatcgggcagaagatcccaaagccaacgccttctattcattcttttttgaggacgttttggggatcttccgcgtccgacgacgtagcatctccactcgttcctccatagtccagttgacttgatcaccaatggggatcagacatttagcgaggtagtcgtagttcttccggagtaggttcacagtgataaaaatataatcgacatttcggaagaccagagcgtcttccttcgcatagcggtccttctgcttgaggaaagcgacagggtgatctctccagtgacggcgcgggttcaagtggtgagaagtgtggtagccatcattgaaagagaatcggttactctgatatttgtcagtcttgattcgacgtgttcagcaggccaatggaaactcaccggaacatcaatcagtgtgatactggacaggtagtccgaattagggtcggctggatccacgaaagcatgctggccccagttgccgaccatcaagcccaagcgcataacggtgagcggaagaatgaacacgaacgtggtagcacgggcattgacgtagttgtaaagcatataaatggcaacgtagctgcccacctcccagaaggcgcatttgactgcatacttgaactgcccctttctccaaaagtacattgggagttccagccagatgaaaaatatgaaccggccgacataggtcaggaagtccgggatgctgtcgcggttgtagtacatggttgagctcaggtcgtctccgccgttaccctcaacgtgatggtgtttgatatggtggtagtagtaagagttccacgtatgtccgtgcatggggtccagcaggtacgggaaaagcgtgtcgaacagatataattttggggtcaggactccattcatgtggatgtgctggtgcttcatcagcgtgaaagcaccgcaataaaaccccataatgagccagtgcaaggcgccgtggaggtacgagaatcggtaatataggaatgcagcacttggcacaatagtggtgaagtaaagtataaggtgcgttaccatgaccacgtcggtctcgtatcgcacgatccctttcgcccagttgatgtatggcgtgagcacatacttctgaaaggaagcgggtagcttggccctcagcagcggggtatcccagaattgggagacggtgggatcaaattctacatgagagggatcattgagattttgaagcttttggactgtttcttcggtgctcagcttgtccaatggcggtgcatctttttggcctggacctttgttagtttgttatttgaccgacaatacaggggtattaccatctgagctgggttgaggctcaacaatagcagcaatcaccagtcgatcttggtaggtgagctggggatctgtgtatgtagagggatccatgatgccttagtacggcaaagcctagtctttatgttaatcctgttaaatataactcaacggaagggcactaacccgtgtccaagcagctgattgaaacaagcttctagaataatttccgggatccccgggtttataaagacaatcgaggcctagcaatacgctgtcctcctaataaagacaacgcgtcaggggcgcgaagagatttcgggagtcgactgtgggtcctggaatcgacaagctatgcgaagtgtccaaacaacagtttgaatgtttctaacacttgatctagtattttcaaatacagctcaagctttccatcgccatccgagagtagttggagatctcgctgtcgatcaatcatgattttgtgctgctccgtcacattccatccgattcagggggctcatggtcggaaacgttttcccctgaacatcccaccgacttaattagtggcgaaaagcacaacgaatgtacgattcttgatttaatatacgttgtatgcatgtggaatagtagcttggatttacaggaagtattcctaagttctagtctagtgaatgagatcattacggcaatttacttttctggggtagccccaaggaagatcaccactaaaagagcagttagctcgcctaggcatgacaagttggaggactaaaaacagaggtgactttcttctcatttacttttctatgctagaggacttcaaggaccctggtatacaatgccttgtctaggccgaggccaatgcactgtggaggttgacccgagaacctgaccggctctattcagagcactgacaaagaaataccggccagtccggttggtaggaacagatatctcagtctcaaagccgtctttaggaaatttccccaagaaagtggatgctcccccaccaccctcaatatcggttccatccaaagaccaagtagccacttccgtggctccattccaactcacatacactcgtccatcatccacggcaatctcaggcacggtctgaggatgaccgatccaggggctcttcgagatccgataagtacggatttctccgctgttaaagaatgtttcggggcctatatggacattgcagagcaaagatccgttcgaggcatattcagcccagtttgcgttgggtccaaagcctaggatgacattgccgctatccaagatctgcattgacccactgttctcggtgaggacactgttcgggctgatgtattcatgctgcaactgcacagtcatcttctctgtgtccaggaccaccgtcaaaccccgggttgaacctgtcacgggacggccagggcagttcccgttgtcgaaaattgaaacaatccgaccattttcgtggaaccgggcatggtgctgaccgttgaagtctgtcgctgcgccaccggataggtctttgaacatatttgctttccctcctagcttccagatcacggcgcctgtttgaccatctacatagacaacggagctcatcattcgacaggaaatgaggtaattgccgagatcgtctttctcgatgctgttgacatggaacagatccggcgcggtcttttcggttttgccatcgcccggctggaaatgatagtactcttcaaatctataatggtccgaagctcgccactcaaatagaacttctcctgtctggacttcgatctcctggaaccctgcatcgaaaatgaattcaacttccggtggtgcctcgaatgccgtttggttcaccggaaagacaccattgataactagaagtgccgtccctgaaggagtcagggttaactcgtgcgcatcaagctgccacccattgcctgaacggatctgataagcttcctcatagcgggagtttatctaaaggacattagaatattccctgatgtaatgccgccaatcggcaacttaccaacgcataataggttgagtcttcagaaagcgagacaacatagtcctctccttggaaggactgtatgtctgcggtgacatacccagtcgtgtgccaaacgagatacccttttgtatcaaggagcatcactcctgggatgttcacctgctttccccagtagggcacgacggtgtaaatgctctcattgtaacacagggaacttttgtcgtgaatgttcaggataggtccaatagcattggatgagtggtacagctggtgaggccatcggtcaaacgcgccaaggtcatatggtcgcgatcgatacagcgggggaatatcagccaatgactcgcatatcaccaagagcaacgccacgggttttaaaaacatgattggacatctcataatatcgtgggttaaatcgagacatggcagccgtatgggatatggcttttagccgatgtcgggggacgatcccaacctccgctgcagcgccaagcagatgtgcgcgggtgaaaccttagggaagtcttggtgcttttgttttggtggagcacctgcacatcggattgcttgtgagacttggaccttccgacctgcttgtaattgtcttaccgtggcttgtggtatgctagattgccttcttgtactccgtagaggctataaaatacatattagcaaggcacacgctcctcggcgtttcgaaagataccccatgatcgacatgatatgagttggttcgtgatgagagctgtttatttatagtcaggggttgcatctgaactcggagactcggcatattgcctcaggcttgcaataaataagcataacattggcaagtggaacgagttcattaatctgtaaacggtgatattacttcgagtcactataatattaggatttacagaagcaactttgaaatacaagatgcggcgaagttgtacttttacacaaagaacatgcggctcggataatatatccatcaatttgaagctatcggaagctgacggtaaatcccacctcttctctcagggcatgatcttctatggtcatatgatatgttggaaaaggcgttcctttgcttagaaaattttcagcgaatcgacgtccagaaagacgaagtaggtctcagccatcaagaggcgatgttgcaactgacatccaaagacaatatcctgagaatatcttgattatatcctgattattctcatagatgcccaaagccgaagaaaaatgtctcacttcccctctgccaattctctagctcctcgtagttcctcgcgaccccaggccactaaggctggatgcagtaagattttcgccaccttggcacatcaatggtacagacccaattttagtagttctttgacatcatgacctccagcgacaattgcaatatctgttggtgttgaggttaatggtgttgttagtgaatgtttctttctccgggacattcggaatgtaaacctccgacagggggatgtatacagacatggagatcgctcttaatttagaagaacaagtaatcaggatatcttctgcaaagacacgctatgatgcgtatctccacagttcgaaaaccatcaaaaaacaatccgtgcacataaagatcgctactttccctcctgaacgtcattttttcacatccaactcagaataaataccagccacctaccccctaccttcaactcccaacctcttaaaccaccctcttaaaccacatctttctcccataaccataaatcatcacatcaaagcctaagatgaagttcctcacatgccttcttatgctggctacctctgccatcgcagctcctatcaccaacaccaccaaggtgtcgaagcagttccaccttaagtccagcggtgccaccaacgcgaatcacaacaacctatatgtctactcctaccacacgggcgccggtctcagcgacgccgtgctcaccagtgatgttagcatagccagtcctatctacctgaatgggacgaacgcggtcgttgatctgaagactgaattttcctggggactaatcgccaccggcgacaccaactatgcctgtgagtatcgccacatactttggaaatttcttcgtgtcacatttcagcctggactaagctaatattttctttcacttagcttgggaacctatcgttatcaacgctggcagtggcggcagcgcaggctactccatcaagggcgatgccttccaatggtcggaaaacaacggcttcggtggctggcttggtaagaaatccctgcgcctttattcgttggcctctttaagaccatggtattaacatctctgtaatagtctgcgattggtaccacaatgcgccccagttgttctacttgaaccgttactatactgccaccattccctccagctgctccaaggtccagttgacgactgagtatatctagataccccacggtcgcttggggtgatttgggccccttttaggcacttaatgatcgacggttaggagtccggtactcctgatttttactagttaatagcgatttcagcgaataatgaatatgagatgcttgtcttttcgctatgtacattctgctagttcaaaccgggatatcaaaaataaaaaataaactagcagctgatcaactgcgtaacatcatgttttaacgtaaagcgtttcccgtttctttcctcgctgtgcccggtcatgaagctgcaattcctgcgatggggacacacgagttctcgtagtaccgcttgtccattccagcctgcaagcgcgcttcttcgttaaatggtccccggatcggtcccttgaaatgcttctgcacattcgaccggaagacctgaacaggatcagtcccctcctgggcacatatccacgtcaaccaccgatgaccagtggtaacatgtgtgatttcatcgttgtggataacctccagggtcgccacgctctcgccgtcgccagctttgcggaacttctcaatcgtcatggggttgacatccagacctcgtgcttcgtgcaccagggcgataatactgattctcgctcggagatcgtatgcggtttcagttgccgatagccacaaactgtggtgtaccgggagcgaaccgaaactagatcccatttcttcgagcctagtgcggagcagagagaagtgcttggcctcgtcgctcgcgaccttcagccagtcgtagaaaaatgcccgcgggagttcctgggacgtcccttttgtttggaatgtcgcaaagcggatgcagatatcaatagccagatcgatagcccacagttcgatattagccagcgcatggagcatagcaatacggctcttcaaggtcccgcctcgtcccgccttcggcatgtggcccggatcaaccgtttgcattttctcgcgcggtggctggtcaggcggggcgacagtgccccttccaagcggcatgggtgaatcagaaacctccctagtcgtgaaaatagagaaaagatgcgtagccagctcgatcttgtgctctggattggcggtgttgagaacgtgggcagcccagtcacacagcgtcgcgttgtcgccgagataagtcgccataccgagatcatctggactcgcaggaagagaaacagtagtagtagtaatagcagctgccttctccgcaggctgcgggtgcttgagctgcactttctcactcacaggatcgacactagcaagtccgacgctgaccccatcctcagcggggaaatccagcgcgacgaactcgccgcgcacatccaccgggaacgtgcaggccttgataccaacgctcgattcaccggtctctacattgaaatcgtatgcgtgccacgggcacgacacgacatatgccgagtcctcaatgtcaaccgaggaatcggccattgggccgccagcatgtgggcattctgcctccatggcgtaatacgaccagccgtcattggtctcgttggatttcaggcttgatttgtcgatcgtcgggagccggaataagacaagtttcttgcctgtggtcaggcgaaccacgtaccgcgcctgtgtgaagtcggatagtttcccgcagttgatccacattttgattttggcaagcgtcgcttgtagcctgtttgcgtgattggatgggtttgtgaggcttttcgcttcgattgacttaaattatcacgtgacgatgtctatggtcccacctcctcggcgcgcatcaatatatcttgttgtaggccaattataggggcacctagctaggtacgctatataactagattatgttacagtgtacccgtctaattctaaagatcatccatcatcaatcttgtgtaaataataatgtaaagtacgtaaaatatgtaattaatatgtcatggatacggtaaattggcatggtaattactagtattcctggtacatataacgtactgtaaaaaaaggctgtacatatttaattagcaatagttataactagccagggtataaagtactaaacacctgcatcaattccaactaaaataaaaaagatgttgataaaaactaaccatagtaaaaatctagtttgtgaaaactctgcataggtgtcgaatatgtacggttgggttctcgacaacgtcataatatttatgcaactaatgattgagccattattcgtcttcttgtcggtttgcctgattcccctttctttccagtccaaaaatctgacttattgataaaccaatcataacatacagctggggcaagattactgaatactaaaaagattgctagaaaatagttaaatagcggtgaaaacatccttgttagatacgtaggctcgggatccagtcttactatgcacgagaaagtaccagctatcaccatgactgttggcgtttacagcaattccttcagaggtcaatgactctccacaaatacatagcccatcacaatgtgatggagcggcagattgcagcggattttagacgcctggttcccaaaaaatgtgggcctcgcttgtctcaattaatagtccgtaactttcctgctgtcgcagatttttccctttagcaggactatttccttataatatttaggctattgaaagccgtcttgcacttatataaatttggagcgacttgacttaggtagagtgtgaagttgaaaaatacgtggtttctgactggtattcatcacgtctgtgacgacttcccaaccaacaccaacacttgagcacattctgcgacaggggggttgaataggtctaggacaaataatacctagtgctcactcttttatttctcttgtctttctttgacttctcatctttccactttcaactcacgtttcaatccccagagcagtgacgatttttactccttaggtgagacactcgctaactaactctaaatgttttacgatagactgacattgtccacagaacactatctgaagatgaatactggtcccaaccatccgatcaaatggggaacgtgtcgagaaggcgtcctgtcccagctgcaacgatttgagtccctgccccaggatggcctcaagttaatggagtcttatcaggctgtccttgataacgatgagactttcacccaatatttctcagacaagccacttgaaagttacactatcgaaacacgtctaagggaaacattggggattcgtcctcctaggcagaataatccctcaatcagctgggtcaacattttccgacatggcagtttcgaaaagcaaagtgatggctcctactactgttatgatgaaggaaagctcgtggaaattgacaagtcccttcacaaatgcatcctactcaaccgatgcttcctcccgaccaactcgtacctgtggccaagtcctgccgacgctgaacgagaagctgaagtcactttggcaatcgaggcagatatcctggacgaaatcgacaaaaagatcaagtgtgcgtacttcccagactttttgacaaagctggtaagagacagactaatgaaaacagacgtggagaaattgaagcgacttcagctggctctgaagaaacgccgaaataagctccagggcattcgagtccccgtgaaaaggtctcgtacgccgcaaacccctgtacagtaccctacaccaaacgagtcacgtcgtcccacggtctccgttgagacacgcgatgcccgtgcacgcagttcatccgagagctcgggtatctcaagtggatccgacatccctttcgccgtctccggtgataactcaaggccactatcgtatgacagagatgatgcggctggcagctcaggccaagagcattcgaatctcatcgatcttgccgaaggcaaccagaacccacacgataataagatgggagtgtcggtggctagacgtcgcagcaacagaaatcctgaggtcgcaccaatccagcatgacaaacagaagtctaagcaatcccaaggagatgagtcgcctaaacaccagctcgatgacacacagaagtctaagcaatcccaaggagatgaatcgcctaaacaccagctcgatgacaacgaggacctggtgcaaccacctccaaaaaagcaaaagttcgagactgagccgctcccaacagatatcgtccaaacagatatcattccaacagacatcgtcccaacagacattgtgccaacagatatcgagactatcgaccttagtgaagaattgccaatgtggaaaggaaaggtcgatacgcccactaaaccgcagcccaaatcttccaccgggaagcgcataggacagaagcgaacacggaataacttcaccgactacgagaagaagcacgccccagcctggttcaagagccagatagacgcaggaaggctcccggccgatgttgagaaggcctatgccgaaaagtttggtgtcttccaccgcttcctcacagtgaagctttgggtcgaccgaatggaggaaagggccagtagagcacagcccccgagcaaaatcgtggtattgaaagtacaactcccgttgcagcttcatatggccttcttgaatgacaattcctcctagccgatccggaagttcccaacgagccgggcaatgtcaccggcagctgtctccagtactagttttccccccgcgccgccctatgtatctccatatcccttattccgccctaatgggctgccgggctcatccgtcgcgtaccagctggactggccctccaaactggctggattaccctcaactaagagtggccttccgaatgtgtactgataatgacctggatgtcggttattgcaggtcctctttcatgatatgactttcatttccaaggcccaagaagctcgctcacggtatgttccatcatttgagtatgttccatcatttgacagcatcgtgaacatcttactaatctaccttcctacagaattctcgttgagcgtgaaatttattttccgtttgtggtgtggattcttcgtgcagctggtttacacttattttcatatcgcctacttcatatgctacttaccttgtaataataccatttttactatttgaggccacccacctagttcccgcagtatcaaacggttccaatgggtagacgcatgatgtccatatgtagagtctcacctacatggctcccttcttcgacggccactgtcactcttgatgtaactccttcgacgtaccctatgattcactttctcaaataagtagcgcgtagctcttcattcaatttacacttcaacgatccacttcttcatctcgtcaattcagccccacaacccgttccttgatgcagcctcccttctataccgtctgacatcattaatgcaaacgcgactttcactaatcccgcgaaggcaaaagcaaacacttaaacttaccgccagcggaaaatcattcacatctcagaacagcctcaccaacgcctcgagcttggctaacacaatcatccggcttcggcctctgccagcgacccccgtaactagattcacaattttcaaaaaactggggcaaatacagtctttatggtttctcgatgtggggtctcaaatgtaagactcagtattctaggaacttacatggcttctactcaatctcaaccgccatgcatttcgatgcctttttagggctcgctctacaggccgctctcgttaatagaccgccagcattatttagtttgagtccatataaggaaaaggcacgccgaagtagtcaccttatataggattgtatcataataggtgtgaatcaaaggtgaaaggctcactcttgctttaacatgtgtattcgtttgactagtaaaccgcgtagaccgcgcgtttctacgactattcctcttgactcaattgttcctttctacttttcccaaactgtttgcctctttcgtcattcctgacatcgttccggtgatttggattaactgcatttattcacgtcccgaagctgtgaacgaactatggatcatcaccaccctcctacccaggtctcggaccaggtagcggcgcctagcttcttgtcgggtgaaaccgacagcatgctcagttcatatgtcgcactgcagagcgaccttgacgaggcttacaggaagtacctcggatatgccgacatcattggtagaggcgacctgatggcaccgctcttgggcgactcgattttctaccccgaagtagaaagaacagccgctagaatattcggcgagccacgcccacgcttggttcaaggcaacgtccaagcacccattgaatggaccgatgtccttcgtgaatcgctaactcctggggatttccaacgacaagaaaacggcatgttcctgtgccgcgttcggggaagtttgattgaggtttctgaggcgagttaccttgagatcctcaccggcgtcacagaacgactcttgcagccattgcaaaacttgtccgacgagcagaaggagactcgagcacgcctcaaactgggtgcctacctgcatcagacacacgagtcactcgtccaatgtaagcccgcccacttctatgacttgttcggttttcaaactaatgtgacattcaatagttgccagcgcagtgcgcgagtctatcattgctttgggtgtaaacccggctattcatgatatgcagctcagctccattggatttgctagagctcgactgcccaccccaatgtcggccccacccgtgactcctactcagtgggtgccctacatgtccatgtcccacacagaaggcgatatccatgagagcactatcaaagaggaagaaacagaattcgttcggtttgagacccctggtatccttggtagctatctggcggaaagcagacatcctgacagcagaggaagggttcaatctgcgcggtctgacgtttttcgaggtaatttcattgattctatgagcgagcgcaatggttataccccgtcatctgtcgacgatctgagttccattgatccagccagcagctcggattattatgcttcgtcaattggcatcactcgaagcaactccactgattcagcgagccacaggatcgcgatggatgcatatcacagtatggtagcggcctctgcttacctgaaccacaacaactatttcaatcccgaattgattgatagcaacgtcctctccgtcaacaaccatgcggtcgaaaacacggatgccaatgtcaattccgatgtcaatgcccgtactgaaccgtctaaactcacctcagagatgaacgttaattcaatcactccatggttgcgcgacattgatacttccagtgatgtaggcggcgatgctgaatcatttggatccaacatcccttggctggctcaatccgaggacgcatcccgtccggctgataccgctgcagaacaatatggaacgagataccgaggcgtaaagagaccccgaactgaatgttcttccagcgaatctgaaagtaagccaggggccggtacaagatactctccaagggaagaggccgacgggcctgcatttgtgaagtgtctggtcgacaaaggatctacttccgacgaaattgaagaacaatacttcaagattttcggggtttcccggtctgcgaagtgtctttgcaagaaattcgagatgaggggtacttgggggttgctgaaatctcaccgagaagctaagatgcagaggactatggtacgcagccgattactcccgtcttatatggaactttactgacgactcttctagtcatcttagtcctgctgtgatcgatacaggtgattttcctatggggtcggagcccagttggctaatgggaatacatatgagatggaatggctttggaaggaaacgggatagcaagggtgttagtttagaggatggtgaagacctggaggcatcatagccggtcatgaccactctcttaatgacaatttcctgatattacaagtccataagtccatacttaacttatcactagagtaaataatggtatgctcggtgtcagtatatggtatactccctagaggtgtacatagttagaatcccctacaggcgtacatagctagagtcaatctgtagtgtttttttcccattgtactcacagcaattagattggcctcgtgatcgaaatagagactgaggtgttccctatcctccctccatcttctttcttctcatcacctttctgttcatcggaccaacaacgcgtctcaacttttaaaccaaagccttttaccaacattactctcttttctgtccttcgcctgaacagttgccaccgtcatgggtaaaaagaagggtgtccatgttggcgtccgtgtcggccaaattgaagcattgcactcaactcaacctggaaccaagcactcaatagaatccaaggttttttccgaagaaaggaagtcttcggccttcggttttgattctgagcttgaaaaggctctcaataagtttttcggtggtcctccttttttcttgattctacctgataccattgagggccactccaaaccttcgacaggcaagagagcgtgcaaaggccgccggcacccaattgtcgtagttacttgggtggatgtactttctgaagcaacaaccgcaagtcaatttcagcgccagaaaaatggcatgtatcggtgtcatgttaaaggaaggttgatcgaggtgtctgcggagaattaccacttcatcgcattgggttacccccaacgtatgatgaatttttcatatctgtccgaggcacagagagtacaagaggctgctggagctgtgagagaacaagacgccaaccctttcaatgatggcgtggatcgtgagtttgctgtcttccctggtcagttatctggatactaatatggaacaacatgcacagagccgctcaactccgcacccgacccaatggacatgacccgaagctcaattgcagatcttttacgtcaaactgagaagagtgccatggtctcataccaaagtgagagagatgtcacaggaacctgccatgtggccgaagaattccaggctgaaacaacacggcttcgccccaaccacaggcaggttagtctccagtctcatcgcaagcagggtttctctagtcggactcccattttgatggcaaacaacccagtcagatcagaagataacctgatcagatctgacgttccaacccacattgatgatcgcggggcaggaagcttggatatcccgaaacagtctcaatccgaaacaagtggtcccggaaacaagaacaaactcctagttactacccatcacgagagctcttttccttcttggacctcctctccgaagaaagaatggcgcgtgcgagagggtccagttgcatccaatacctcccctcgtgcagcgccgactattcggtattcctcacgcgaactaatcgagggaccagccttcatcaagtcgctcattgagggcggcacatcgtggaaagaacaggaggagctgtaccaagccgagtttggtgtttttcgctcccagtttagacttgtcaaaaggttcggcctggtcgacatgaaaaacggcggctttggcaagggggcgttcaagaagtcgtcgagacaactcaagtctcaggtatgatatcttccaatcactcttaatccgttctctctcttacttgatcaaccgattaacatctcttaacagtcgacctacaccaacgtggagcgccgggaatccagcccgattgaggcttcccaggccatccgccgggcgcgggagaagaaaagggacaaggggaagaaaagggaccccggcccttccgaccctgcgtaggtcagtgattcgaggtcgggccgggggcctaaattgctagttcgaacccaaatctcgacaaacgaattgagaccccgctagcaggggacagaaggaatatgagttttgggggtgatgatactccctgaacatgtgtaagattcagaaacagaagcacaatgaaagcgtacgcaaaagtgatgatgcagtcgtaaattaagttgttaagtacataaggtataataatctcggagtcggaactcaacgtttcgttaataatagagaactaggttcattccacagtggacgtatacaacaaataggaaaaagaacctcatatccaccgtatatgcttcaaaaatgtgttcttacaaggcgagagcaagacccagcacaccaacggctccagcaagactcatggccacaccagtgggggcggcaccaccatcggcagtggtggatgaagcagagccggaggccgaagcagaagccgcagccgaggacgaagcagcgtccgagccagtggcagcggaagaggaagatgagaccgtggtagtagaagtagaatcggtagaggacgaagcggcagcggcagatgatgaagcggcagaggacgaagcggcagatctagaagcgccggagctagcagcaccagagctagaagcaccagagctggaagcgccggtggaggtggcctcagcagtgctagggccagagctgcttgcgcccgagctggtaatttcagcggagacggatgatgcgaaggaaggatagtagccctcaaccgcggtagtaacgtacgccttgacgctgtcggggaggctgctgtaccaggtcggccaggagttggagacgatgccttgctcgacttgcgaaaggaaagcagcggtattggtggcttcggcccagaatgagcttgggacagcagttgctagaaccacggcaatggaggggggaattatatccgcgaggccagcgtctccggattcaatagcggagttggtgtcggccggggcggccatggccatgctggcgaggaggagggctgcgagagacttgggctgcatggtgacggttggaggaagtatatactcggggtagaaggaggagataaaatggttgtgaagacgagctatctctggtgtaattgaccaagtggaagaaaaaataatcagcatctgggggctttatacctaatacgcctgatgcggaccctggaaggcaatgcgaggctgcggcatagcccgaatgagaccatcgcgctatgttcccgcgttccactagcaacggccaatcgcagcctcgtcgcccccaaaagttgtcgatcaaattgaaaggttgcacctgagatgttacgagaaatcttatatagcgcaagcattcgcctaacatctccaacgttgggggctactgtaggcgccctgctgcgaaattacccgatgtacgatgtagggctagaggctaactaacgtctctttttttctgatttcggaactcatcctctgtacgagtcctggtattcctcagaggatactacagtgaattgaaggtccggtgttctatccgttcgccaagtcccaagaccgcattacgcacgcctttttgtacggagcacaaggctctccatcattggattcggaggctcttgaacgtgtttatatgacgtcatttcttgggggcccttggaaataattcttgctgcctttgtctgtacggcgtttgactggtgcttgggtggtaatatccccacctgtcttgtgtatggggttagcggtgcaattcaagggttcaatcagacgacatgttatcgaatagaagtttttattgtacgtaaacacaacacagttatatgcaccgcccattcaaacatctcctcgatggcaagtcattggcacaaggcatccaatagggtctacatcatacacagccgtgccccacctgggcacaaggctgtgttgggtaaaagaccataaataaccacctccatgtagtgagactctagtgaaatcgaatcagtctacagcattgctgcgacatattaagttgggcctgtttgagcactcgccactagtgcttgggacgttcatatagccactacattctcggcattcgtcatggtcatgaaccactcgggatcagtagctagtatcttctatctatgttttaatatctcggttaatttatatcgctgattgatcacacctatgtatgtctgcatatatgtgtagggggcactatatatatatctggtgctaacggtaatggctattgttgtgccacttcgggcgtgagccatcgaactctacatatatatatatctctcgcagcgatatatcaagcgtgaattcttttctttaaagaaatataaaggcaatggattccgcaccaaaaagtattgccatttaccgtcagaccaaggctattatggctccacttgatgtgttgatgtctacaacgtggttttgctggcaactttctctattgatatactacagcaatttcaacaatccgagacactccaaacgaaatcgttcaaatgaaacatcgcaatctcattttgcatccagttcgaaggaataggatagatagaaaggacaaaaaaaagaacaaaatcgcgcacttctgcctgaagaaacgttggggctttttgtttttcttgctgaaaatatggccatcataagtcagcctaaatgcgtcagttctatgcgtaatagaagctcccatccattgttcaatgtaagcttaatgaaacaagtctaaaccgaaaaaaaaaaaaagaaatctctccctcggggaatcgaaccccggtctcccgcgcttatcggttttaatgacaagcggaaatcatcaccactagaccaaggaagaatgcgatgaccgagttactgctcggccacttggctggttgatgcaaaagtgatgaagcgaatgacatatgtaccacacattcgcaaatgatactcgttaatccatgctctcttccaatcgtacgcagtctattggctggtctaacttgcaagattgcaagcaagatcccaggctatctgaccaggctatttctattctccgtgttagagatagtccgccctaatctcaatccccaccttgaatgttctcaaacggaaagtcctggagaagtccgggtctttcagccgacttccccgcaggaagaaataaaaccgttaggacgcgcatttttctttgcggtttaaaaatcacaaacaactgtcaattatgacatccgttttcaagaatgggcgcatcttcgtgccgtcgcaagctccggataatgaggggaactttgccgagtgcatgatcatcgagaatgacaagatctcgcacgtcggctctctcgatggaataaccatcccagaaaatgcaaatgtcattgacctggaagatcggactgtcattccaggttttatcgacgctcatgtacacatcctgcattacgggcagtcattgcgcaaagccgatctcatcgcatgcacctccctcgatgaaatccgcgaagccatcaagtcctacgccgaagccaatccatctctgccgcgcatattatgccgaggctggatccaggcatctaccaatggagtcgcattagcaagtatgctggagggtatcgacccgcgtcccatctttattgactccttcgacatccactccatgtggtgcaatgcagctgctctcgatgagatgggggctcacacggcccccgatctccctggtggaacaatccaccgtgatgaaaatggacgagcaactggcttacttgacgaatccgctattatgaaccttgcatggccttatctagaaagtcttagctccacggaagacaaactgagtgcgttggacactgcagttgctgcgtacaccgctgccgggtataccggactagtggatatggccatggacgaaggaacatgggagattctgaatctctaccgtcgcaatcataccatcccattccacatcggcgcccactggctcgtccctttctcagcggatcaagacgccaacttcaaatacgtggatcgagcgattgagctacaccaccagtacaacgagcccgatttccatgtcctcggaataaaaatcatctgcgatggcgttgtcgacggatgcactgccgctctcctccaaccgtacaccggtaaaacagatcgcgtcgagccaatctggcctgagaatatgctacaagaaatagtccagcgcgccgactcagcaggcatccaatgcgcaattcatgcgataggcgacaggactgtgaaccaagcaatcaacgtgctgtcgagagtcggcacgccaggccgaagacacagaatcgaacacctggagatgacaacctccgaagacgccaagcgactgggtcagctgggtatcacagcctcaattcaacctgtacactcggatcctacgcttttcaaggcgtggcctggtcttgtggggcccgaccgctgtaagcgcgcattcgcctacaaggacttcctcgatgggggtgctcccattgctatcggcacggatgcccccactgcggctcattttcctttccctaatctttacaatgctaccactaggcgctcggcgattcagaccgagactgatgatactgtaaacgaacatttcaagttggggttgtctgaggcggctactgctgctacgactggtgcggcttatgcgcgacatgcagattcctggactggaagcctgcggaagggattatatgcggatttcttggttgttgatatgcagtggacgccggagtcattgcttcaggcgcgtgtctgccagacttggtaccgggggaagaaggttttcgactcatgaagtgattgatagcggtagcctatagacttgaaattagatagaagaatacacggatgtacattctctattccttatgacgtcgggtcttgtgatgcggggtggacatcacggtgacatcaccgctattgcctcacaacagccatcaaaatgtagatgtacaacatacagtacagcacgcaagtaagatatagaatatcaattgacaatttcttaatttggagtcatcgcttcatgaagacatcactactagttccgaactaagtcttccctttgaaacttcagtgtagtcccgagtacaacgaagtatacgaacgccaattactggtcgagttgttcggggtgctcttgcagcccacggtcggtacttatatcagagaggaatgaatctgatgtttgtcagtacaaaagctttgatctcaagagtcgtagtcgggggtaacaaagacatactgtgatctacgtcctgcgaagaagaccgacgtggatattctggggcatgctgatgcgcaggctgtggggaaactgaagttctgtttatttgaatcagtcagtaatgggatacttcggggtagacttcaaaaattgtgatataaacgcacggggcgacatcactgtccagtatgagatcctcactcctgatattggattggtcttgctgttggtgctccatgtttccgatagagctacggcgcttttcgtaattaggatctagggggttgtgatcaatatccgtcttgaccatgttcgaatttagagtagactatgtggtggcaaatggtggattggaggtatgtgaaagtgttagattggggaaaataaactatttatcttatactacgtacgggaagcctccgatgtcataagttgggcgtggcaaacttatgatataaacaatccatgcggacgcggacctatcagagtcatcgtgatcctggtatttgaacaacgaatgtcgcccatattgaatattggcggcgaggccatgaaaaagagttgagctcttgtgatactcacttgaagtcgactgactcgttttgcactgcgaattaatttatcatggccgaaattgtatgaggtcaagtgctcgtcaatgtacgacacgatggcaaaattagtaatattctgggccattcgattgtagtttaggattgcgaaatgaaaggacaagtggaggagaggtatgagaaatatagatgtagtactaatactcgctggttcatcgtctatacattttgatctgtcgtctactcttggtatatgacctttctgcttgctagcttagcatcgagttcgaaccaccgggggcaaattgcaaggcgtcaaaatctcgccggggagaagtaatattcagtttccaagtatgagacaagtcagcgccatgtcaacaatttgtggcggccctcctcgcaacatacatacagtcacaacagtgagatgttaggcttctggtgagtgctgcttgtgatttcggacacattgccatgaccttttggtctcacgaaaagacattcctcttgggataatatacctcgaattgttttgagagttgagaatctcattctgggttctttcctccagaaagtttcccaccatgtcattcattcatcctaaattcattccgcagccaaggtgacaggccatttgtcatggcacgtatattccgcggtgtatttcaaagatggcggatattatatgacaacagaagggattctgttgctgacattctggtgtcaccaatgggtcattggcacgaccatatgagtagcaatgtcgtgctgctaccaaccgaaatcattgtagtttgagccgaatgaagattttccctcgtagtccagtattattcccgactctaggaggtctggctcacgttggtttgtccctttgttgaatgtagatatttgccagggaagcagttgcctaaacaggaaaacacactagtaccaaaccggaaatggaatgcgatcacaggaatagagaactccgatccgaatttgcttctgcgcccctggtacggagttcatgatcaaatatctcgaggttctagaaaccgagatgcggctcaagcgaccgttaagtgctattaataggtttatgattacggaaggatagccaaacgtatatattgtaggaaaagtacgctatgaaatgactgacggccgtgacaatgacgaacaaactcaacgagacaatactacaccagtcactgaaagagtcactattttcctaaaaacctcttgattgatgattgaagtacggagtaaaaaggccattcttggcttcaaccccactacatcttggcttcttcatacagctaagagatccgatattgaagctgctagatcgcgaaccgcggaatgcacaaggtcccctctggacccgctggacggaaatcgtctagctcgaggtgtatcgtgcagggtaagccgagcatgattcgcctcgggacagggccgacaaagccaatgtggggtgcagaagcagatcatttagctaattcttcatctaaccttggaagcacatcagaagaagacccggtcaaagcaacgtcatgaaccaaccacgttgtgtgaagttgaaatcgaccccggggcatgttgtcactagtcctaatggggctattgtctggagaagtgggtggagagaggatgtcactgttcggatcctcagttgacaggcgcacacaaattttttcacaggtttaaagagagcgggatttgtcggttttctgaaggtttatgcttgaagtaattgcattgctgtttgcgactacgatctatataaaaatctttgaggtgaaatattacatcataccttcaaatttggttttggttcactctggatccggaagagaaacaccaaggctgcaccaatctataccagccttgaaaagtgtcaactgagtcgcggtgggatcggaatggtgttcacacgtggcgatatatccggccacgatgatcagacaataggtaaacccagaataccaccaaccgagatctagaatattaactaacagcgacatagatcatcaagatcctagcaaagatgtcataattgtgtcctgggatgggccgcgagatccaggaaacccatacaactggtctctgtgcgagaaatggcttctcacagccctcgccgtgttcgccaccttcatgaccatgatcaacggcacaatcatcacagtagcccacgatcctatgaatgagcgcttcaacatttcagatgcccatttcccacattcatactggcccgtcacatcgtgggccgttggcggtggctgtttctccctgctggtcctgccgctcatggaggatttcggtgtgcgatgggtgttcctgggcacgtacgtgaccttcatctgttttgtcgtgccccaggctgtggcacagaatttttacacgttggtcataacgagattcttcgccggtggttgtgtctccatcctcgccaatacctctggcacggtgattgggaatgtctgggacacagagctaaatcgcaacgttcctgtcagtctttttatcgttgcctacctgtcgggtagtagcattggccccgtcattggggctgctatctaccaggctctcacgtggaggtggattggctatatccagatcatgtggtatggtgctttcttccctctgtacttctttttgttcagagagtgtcgtggaattgcaatcctagggcagcgagctagggctctgcgacgtgaaggccagaacgcttatacccagcatgaaatcgacacacaaggccagtcgattttgagtattgtgggccacagtgcgatcagacctcttttcctcttcttcaccgagtccgtggtgtttgtatcgacgctatggtccgcctttaccgtcggtacgttgtacctattcactcaatctgttgagcaggtgtttgtagccctgtatggctggacaccagcacaagctggatacgtccaatcagcagtcgtgatcggagaacttctgggatgggtggttaccttgttctcaggcaaactttacttcaactcggcatcccgcaacaaggaaattcccggtacgcctattccggaggcccggctgtacctcgctattgtaggcggtatcttcggcatctcgggtggtatgttcacatacgcttggacctcataccccaatcttccgtggatcgcaccggccgttggtctcgccatggtaggggctggcagtgtcattgtcgtgacgggaatttccgactatgtggtcgatgcgtatagcaaatatgcaggcagttgcatgggtatcattgccactggtgagaacaccctggctgcgttcctccctctagctaccatgagcatgtattctcatcttggcctccgatgggctagtacgctactagctttcattgcattggctctatcttttgccccgatattggtgctgatatggggcaaagagatccgtgcacggagtccgttcatgaaggaagccatggtggaaaagaggaggaagagtatcgactcggtctgacgaatttttctctgtacacaaagcgctatgaggaacatattgcacatattaaagatttaagaacttgtttgttcactgaatattttctcgtgtttaagtttatcgttctcccttcagggctgatgcccgtggacaagtaaatcaagaccatcctacgccccaggagtttctcaaaggcttagccatggggctttgagacataactagatagattttagtttgctctaacctaagatctaaatttaaaactatagccgacattctcacctcatgagccccctacttaagcaagaacacttggagagtgaactcaagactgtaaacttcaagcgacaagtggatcaattgtaagcaatatagtttgaatcagggggaattttcatagaactactccataaatgtcggagatattccagattgcggtttagaccagtattgcgctagcccgaaatgaagtcccccccttaacctcccactatatgtccttccacgtttgtttttcaaggccctcgaggcgaatgattattgttgcttaacgttatctcccgagaagaatatatctgtcagccacggacggaccagctagaaaaaaaagaagggaaaaaagggggaaaagcccactgtcctctgtatcgcaacccacgatccaactaccaagttaggaataatagccggattatcccgttagtcctgctccccttcaagaacgaggggtgagacaggctacgaatccgcctctcttcttcctcaatgagaagtcgtcaaacaacctgtttttcctcatgaggttgcttgcatgagtcgaggaatgacatccccacgtttctgtcaattgtcgaattctagatcgtttcagggcggacgatcaaacggtttgattgccggtgccctgtgcgatggtctgaccatgtacatatatagagttagtacggagtttatactgcgtttgcactagctgggtacctccgccgagactatcagctagtttctcaggggctggaaaaccttgattggagttgaaacctccagccagagtctatattgattgcatgagaatcgtggatggttagttctcgatctaatagcgccccattgagctagatacaatacatgctgtttttagttctttttcggtgtcttactttttggtttgatagtcgatatggcgatagtcgatacaatatatagatcagtcgataagagtagtcgaatgcaaccgtctttttagttcgacgatgagacatcctgacacgtagatacgtacactgatctgataatgatgatctatgtggaagatgacatgattgtacattcctgttcttcggatacaggtgtgcaaccatctcaaagtaccaagctcctttaggctactgatctcattgaaatctctgatcaggagaccgtacgcgacgagtcacagtagtctaccgactcacatgctgtggggtgtatccaaagcttggaattatgtcaccctatagaaaccctacggtacctgttacccatgtggtctagaactttgctcattttatttatgacatggctggctggggaaaagtggaccaggcacagtacaggtacagggtaaagatatacaaatacaaatctgtttggcttggttttgcaggtagaaagcactcaggtataatattgcgtctatataatataaatataatataaagttactaatagatactacgtgcccaggtggtaacccccactccgtattctccccattagacgagtcccatgcggcgggctgtggccccaaacgagatcagtcggaaataccggatgtacaatccaaagcacagtctacatacaattaggcctcggagaaaataacaggagaaagtcgggaaggtttcaatgcatgtaagcgcccactacacttctgaaacaacagggcgggtgcttcacatcgcagcgccagtttgatgagccttggctgtctccacctatcccgttggactcacagggcttttggccgaaaaggatatctaaatatggcaagtgatatgtttatcacttggttatgcagcctgatcaccatgtggattgggccaatcatgaattttgacatacaatactatacaaatatacaaaggggggtatattcgctttgataagaacagagtcttggtttgatatattccaagactaatggctattgcacttggatgtatgtgttgcttccaagaccatcttctctatatgtacggagtatcatctgggcatctatggaagtatatgggatgtgtacctgaccccgaataaactgatttccccgttcgaccctgtaaatgacggataaatacagcgtaaataaccggcaataccagattaatgacataaataacataaataacacccttggaccattaacaaccattattcaggcctccgcccggtatgactaagaataacccaaaataacattactagtttatgaccggtcagacgtccctgggcgcttcccccattcccagcttcgattattattagacttgactgtatcttcttcccccccttcttcttcttcaccaatactcgagcttcttcttcactttcgtttctttcttccgctgcgcgcgaaaatccccagaggcttaccggctggtccagttccattctctgacaatctctctttctttctccttgtctacgaggctggttcctccgttcccttagcctttcgtgcattccttgtgtgatctagaacatctcccgatcggatatcctctttactgggcgacgttgatcctcgcacttccggtcctatcccgttcacccattcagctggtgagtttgatccgaggtctcgcagctatgtctcagcagagtcgcagagggttccttgaattggactcagatcgcctctttgtttgcgcatgggttatcatgcggtcttttccccggtgctaattatctatatagtgcgcttttcacagacaaaatgtatcctcaaccaggtgctccaattccgatggcaccacctcaaaagcccgaaacttttatgctctccaccgaagcacagcgaagcctaccccatgacgcgcaagttgctcttcagcaagtggataatcgtatgtctttgggttatctttatcccccgcatcaaagcaatgtattgacatggggccagtgaaatatttccttctgtctgctcccgttgactggcaaccggatcaactcattcgacgcttcttgcttcctacgggcgactatgtctcttgtgtttactggttcgtctcactcttgagcgtgatggtttgggaagccgactaacccggtctcaataggagcggcctcttccacatctccggtaccgatattgttcgatgtctcgcatttcgattccaagccttcggacgtccggtgaagaactcgaaaaagtttgaggagggcattttctcagacctgcgaaatctcaaggccggcgtagacgcggtgctggaggatccaaagagcccattcctggacttcttgtacaagaacaattgtattcggacccagaagaagcaaaaggtgttttactggtacggcgtacctcacgaccggctcttccttgatgcactggaacgggacttgaagcgcgagaaaatgaatcaggaggccaccacggtcgcagtcagcgaaccggccatgtccttcgaattcgactcgtctcagtctctgtatgagcaattgaccaagtcacaacaagtgaatatgaactcgttcgctgcccacgcaagtacgacatatggccagcccaactcccccgtgcttcggaccgttgacgcaatgcctcctccgcagatggctcccccagcgatccctctgatgcaagacgactctgggaatcagatgtacagccaccaacagatgcccctttcgaacaatctagtccagagcatcattaagcgcgagcaggactatggccccatccagtacgatcgccacggaatgcccattccccgccctcatcagcgccactcttccatgccgaccttctacgagtactcccctgcgccatcctttgtatcttcacaatatgaggattacagcaatcgcggcctgtcctttgaaccagtcaccccgccacagcattcggtcggacttggatcggaaccggcttacatcgccaacgaagataccggactgtacacagcgattccagatatttcaagcgggcctgcctatcaccatatgatgcagctgcctccttcgaacctgtctagtgctcactatcagcctgtgccccggtcctattcggcaaacccgtatcccgtcatcgagggatccccaacatacaagcagcgcagacgtcggtcatctatcccgccgaacagcggtgctgcgacacccagtggcgcagctcatgtccaatcaacgaccccgggagtccaggcggtctcgtacgctgctcacagacctagtgatctgcggcgttcggtttctagctcagtcgctccagtcacggagggggatgaagccactcaggaactcgctcgcaattacccgagtgcgctgctgccacaaaaggatctttatcacgaaatgtcccgtcatagcacgccgctgcaaagcctggatcaaagcactgcacatcattcaggctcaatggcaaaccaacccaatgatctgacatctctcccaagcagtggtaccatcgagactgcggttcaaaatcataatgctcggtcagagcgttcagcgcctggtcctactcggagagccaggagtgcaaccatgatggagttgggaccgtatccaaccaaggcccactcttgccctatcccgtcatgtggtagaaccttcaagagattagagcacctcaaaaggtaagcttacttctattttgtcactcaccctggtggcgcaggtttcaccgagcgccggtgagttcgtttcaattgccgccgactaacccgtttttctagacacgtgagaactcatacacaagagcgtccgtacccctgcccttactgcagcaaagctttctcgaggtcggataatcttgcgcagtaagttattattgtcttatttattatacgacttttgctaatattcagtagacatcgtcggatccatgaagcgcagcaggatggtcagacaatctctcagaccgaggaagatctggagaacgatacacatgaattcggttcccccagggaagacatgtccccacagcccgctcacacaatgattagtatgcccaacatgacgtcgatggcagctcctttgagcatgccgtccgccctaaccggtatgccttcacacatgatcgctccgcaacttctccaacaacacatgtgagaataccatagagcacgatgtgtctgctgcaaaacagtagatgcaacatctcatgtaatcatcacggggatttgtctcaactttcctttctctttggagtcttcaaggcgcatacaggcgtcctttttgggttcggggcttattagcgcctcttgtttaatcgcacatggtctcatgctggccttgtacataccgcgatattattgtatagcccgtgtgttatgtctttgcttgtctttgacacagtctttcttttcctttggttttgttgggtttattttgggttttcgaactgtgcaatggtcacaggaaacgccgtgtattattggtgccgactgccctgcacgtgaattgggttgcgctggcagacattcatttcacgcctggcgggcacgggcacgagcgaggttcgactatctctcaatgggaaatgggttggaaaggaaaggatttgggtttgcttcttcttggatcgtcaggcattgtccacgaagagcggctgagaacggtaaggttattttgcacgcctcaaatcacactatatagacagagacattgtgtaacgacttgaattggaaacagaaaaacacttgaaaatcttcaactaccaatattttcttgctagtaaatgtccacggtggcaatgatgtgatcaagggctggtatggtcctgaggtagtaggtcacgtgccgctgacgtcgccctcgaggaatgggatctcagcagatcgcccgctgacacaccgcgctttgatcaacagggctataccctgtcgccttttagcttctctcagctactaatctgactgctggcagtaaatgatgcgtggttgccaacacccagcatagccccatctttcctttccgacgatatctacttccccacactccaacaatccacggtccacactaccacgaacacgaggattgtaaattagtgaaggaaatctccggtctcagcaactaccatcgaaaaggcatatctcagcttacttgagccccgagtcacagcacagtcagctgctggaaatcacagcaggcccaatcatatccaaacacaaatcacctagtttcatgagtcaatcctttcaacgcatcgaaagccggattccttaattttcccatgggagccttgaatttcaagcctgcccctggttatattgacgagagctcgcctctcatggttgctactcgctctgcggagaggcgtggtgtgcgcccttttgccggtgccgatgagtcgtctaagaatgcgctgtacatgttccttttgactctttctattggtgggtgagtagttttgtatggggtgatttgacttgtggtcatttattgatattgggtttctttgacagacttcagattgtttggtctgtcgaactttctaatggatcggtaagtataagtcgcgacttacaggagatgatttgaccccaactttgcaccttacccctttcatttccgaagctgtaagactgaataaaagaacatgctgacgggttacagccattccttctatcccttgggatgagcaagtcgcttcttgcctttgtttggatagccagtcccttgacgggcgcactggtgcaaccatacatcggtattcgaagcgacaactgccgactcgcgtggggtaagaggaaaccatttatggtcattggaggtgcagcaactgtcgtttcattgctagctctggcatgggtgaaagagattgtgggaggtgttctgtctatattcggggttgaaacatcagcgattaagattgttatcattatcatggcaacaattttcatgtgttgccttgattttgccattaacaccggtgcgcattccatcttcacttttttaatggttacttggctaatcttcgtcctatagtgcaagctgcagccagagcatttattgtcgacaactgccctacccaccagcaggagctgtccaacgcctgggccagtcgtatggtcggcgttggtaatatcttagggtatatctttggctatatggacctgccaaaggttgtccctttcttgggaaatacccagttcaaggtcctgtgcgtacttgcctcggtctttctgagcacaactgttgccattagttgcatctatatccaagagcgggatccccgagaagacgggcccgtgactgacaagcttggcttggtctcctttttcaaacaggtcatcaagtccattcggagcttgccaacgcagatttcccgcgtctgtgaggtgcagatcgcagcgtgggtgggctggttcccgttcctgtactactccacgacctatatcgggcagctgtacgtcaatccaatattcgcggataatccccatctctccgagggtgaggttgataaggcctgggaagatgctactcgcgtcgggacattggccctccttatctatgctatcatctcttttctttccaatatgttgcttcctctcttcgtggtccccttgtatggaccggcgccagagactgtttcgcaacgggattccctagacggtgatttagatggtgattcagagccagctgcaaggagactatctttttcaagcatcccgacaggcaatgcatccgagcctctgcttgacgttccagtcggacaagagaccgaagagaaacccacttggctttctcgcctgcgcatcccaggcttgacgctcccgagggtctggctcctctcccatctcctcttcgcggcgtgcatgttcagcactttcttcatctactctcatcaagccgggtcggcatttgtgggccttgtcggtgtctcatgggctgtagcattgtgggctcctttcgctcttatctcggcggaggtagctaggattgatccttctagacgaaatcgtcgccgagcggctcagactacttataccgagcatgcagatgaggcccaggatgagggtcccggtgaacttgacagcgtcggtggcagtgatattgagaatggacacccgaaagattatcgtgataatggggatgttgcacaggcgggtatcattcttggactgcataatatggctgtttctctcccccagattctgtctagtcttgtttgcagtgctatcttcaaggcatcccagaagcaaagaggggagccgtgggatgatagcgtgggctgggtgctacggtttggtggatgtgctgcgttggtggctgcatggttgactagaagggtttcggatggatcaagatagacatgatatgtagattgtacaatgcatttatcagttcttgtacatgttccgatgttgtatatattcagttttaggcaacgtataacaaacataaagattctgcagggaatagcgatcgtcgtgcaaagcatgtgggtcctacattcagccctagagtcaatcaaattatatcgcataacgatgatgtgttgcaccgaatcggccaaccctttgttcctgtttatttggccgaatcccgagaatcggcccacgtgtaattttaaatacacgatacgcaaaaaaccttacgctatcaccgtattgttccagtttcaccactaatttgggtctagccagccctgccgtattctgtattgtacaacccgtacctgacctcatatctgtccctctgatgcaacttaaacagtccgtgtcctattgctccgtactgctaacccaattcgaccttgtcgcaaccttccgctatccattcctttgtggattatgtgcgcctggtcctgccatcttgatatcattgtgggagtgaattgccagtccttcgctctggcctttgatacttcccaaggcgtgagccgcgatggctagccaatttatgaacgatggcctacacgccctgcttcgtatgtctctctgatcgatggctctgaacgttgcgcttcgatttttcatttggactgggagctaacatgtctatttctgttgtagggagggcctctgaagactccgaccccgatggtacgcgtgcctgaaccccctcatcgctcccctctcgtcttgtcgcgatatagcgctattcagcctcggaaatttgactaatatggactgcagactcccccgaggcagggtccaaggagatcacgagctcctgggcattgtttatcatgatcctgttgttgatgttcgccctcttcacgagctatatccttcagcagaggaagatccaagctgtccatgagacggttctatcaatttttgcaggtaggcaatatcctcgagtggtgcaggcgcgatctgaaaatatacaatatacaaagattcatctgcgcaaattggtacggacttgctaacggtcgctagggatgttcgttggactactcatccgtttcacagactccaccctccaagacagcgtcgccttcgactatcaattcttcttcaacctcctgcttcctccgattattctcgcctctggttatgagctccaccaggcaaactttttccgacatatcggcacgatccttacgttcgcgttcgccggtacctttatatccgcaatcgtgctcggtctggtgctatacctatggacacggatcccgctgagtgggctgaatatctcctttgtcgaagctatttcggtcggcgcaactctctccgctacggatccggtcaccatcttggctattttcaacctctataaagtcgagccgaagctctacactattatttttggcgagtcgattctgaacgatgccattgctatcgtgctcttcgagacggcacagaggtatcatgataccggcgcggctggctctttgacgttcttgaatctatttgaggccgtgggactctttttgctcgtgttctttggtagcatggttgttggaatgctggttggaatcgctaccgcgctgggtctcaaatacaccctcgtgcggcgcttgcccaagattgagagctgcttgatcattttggttgcatacgccagctacttcttctccaatggcgtgcatctatccggcattgtctcgctcttgttctgtggtatcaccctcaagcattacgcctactataacatgtcgcgtcgcacgcagttgaccaccaaatacctgttccaggtcatggctcaactctcagagaacttcatctttatttacctcggcctcgatctcttcgtggagcctaacctccagttcaaccccttgttcatcatggtggcagtgtttggtatctgtctctcccgatacctcgcggtgttcccactttccaaggctatcaattggttcattcggtatcgagcacgccgccgtggcgtggaggtccccgacgagttgccgttcgcttatcaagcgatgctcttctgggctggattgcgtggtgccgtcggtgttgctctagcagctggtctatcgggagtcaacgcgcccgcacttcgtgcgacagtacttgttgtcgtagtgctaaccgtgatcatcttcggcggaaccacagcacgcatgctggagattctcggcatccgaacgggtgtggtcgaagagcttgactcggacgatgaattcgacaccgaggtgacccatggcggaacctactataagcgctccggcacgagcctaggatacatcccgcgacgcaccgactcggtgatccccttggatggggtcacggccaacccacgcgctggacccggggagcgaacacacagctactccaccggaaacagtcgccgcccaagcccaccatatacccacacaagaatgtactctgccgcgtacagcaacaaagatcaatcctggcgcgaccgccaatctaccgcgacgttactcaacggcgcagctggaccgagtgctggggaaggcagcgacgacgagttcggcctgccaccttcaggcgccagtcgttccaacgatcacactcaccctgatgagttcgatcttgaaatcgagggcatctctgacgatgacctcccgccggctgcaaacggagcctcacgtctccgcagatccgcctcccagccccctcagccttcgaccgtcttacccaccagtgccgcggcatcgaccagcgtctcgcccagtcaccagccagcgggtatgtccgcacgggatgcgatgcgggggctgttttcgggtggtgcttcgggcgaccatgcggcttggttccgccagctcgatgaggactatatcaaacccacccttttactagaccagtcgaatcataagggccctgggcctggtgcggtttgagatgatgatacgttggaagtgacttccattttgttttgtttgctgtgggtgtatatttagccttgggtctgcattgtcgatgttctgcttttctgcattttggcttccatccaaagcctgattgcttgtatgaggttgcgtaaacgaaccccggtctaaacttatagaagtcaacaagatcttcaagtgggaactacaagtaccctctgtaaagtaacagtcatagcattggttttccaaggttctccgcactttgatgttgcccgttaccccacactcgggatatctcacctgtaaagggaagatggtcaaaacacccgactgagacaatccaaaaagcgtaagacgaaggaacaatccctctgtctccgtcgatggcgatttaataaacgtaacaccctgcgataagcaaaagcttcgccctgggtaggtacagccgtgcgttcctatctcttccagccttatcgcccactcggatgagcgacagctatctgcgctggatggcgtaggtccgacatacggcaccatgcttgtttcgggcacacttacgcccgtgcctatcttcttgtcatctgatccctatattagcttctgaggcttgcggttgtgctggtatgttttcgaaccggtttgcgccgcttttagaagggggctttataggagtagatgtcagcacggcttagtcttggtgatctgctaaggagtataggtaattacgatgctgtatggagtaactacatatacgtacctgggttgggtactaggcagtcacaagaattgaagcagaacagggcaatatgaggcccgcagatattgaggtgctaccttgcatatccttactatagggacatacattatgatcagtatacgacttgaatatgttggagtacgcagtagtaaagctgcctatcaagggcttttgaaaattcatgatcacctaggcaacctgtcaaacaacctacaatactctcagtggcgtactgggttctactcagcgatcaaaaggcagcaagggatgaaccctaagggagaaaacggaacgtttcaagatcacatacaagcttgtatttatgctttcgcgctccgctagtccagccgcctctaacctaagttggctcgaatatagaagtgatatgcaaaatggtgtcatgtacccctcaccgtgcagtacagatagatcgatctagttatcttgtagtattctagaattggaaggtattcaacggttatgtctatcgagaccgtggtcggatggcaaggatctgcgcttagaccttatcgagtcttgagtcggtgcttatagtacttgtgtccatcggaatattttgagacctaaacctcctatttttctttttgtcccgagggctctatttccatcgaatcttaggtgttcctcttcgatcgcgtgggcttttgtttgcctacccacgacttcatttcctctataaccattcctaccctagccatggatgatacaatggagaaagtgttatcccataaggtcaagaggcgtcagtcgacggctacaggtcatgactcgatgccccaggctggagataccgagttgctaggtgtgtataatccccggcttattggaaattggtgttacgatatgagatcttgtcactgacggatcaaacagcaacactcgggtacaagcaggaattgcggcgtcattattcgacgattgagatttttgctgtcgcttttagtattatggggcttttgccttccattgcatcttcgttggcgttttcaatgcccgctgggcctgtgggaatggtttgggtaatatactcctcagcctgaaattggttcgcattgtgactgacataatggatagggtatgcatctattctttcaggagtatcgtctggcaattgctaacagactccttggttaggatggttcgttgcgagttgcttcatcttccttgtggccttggcaatggtatgatttactccttatataaccctaaaaaccacagaactaataaccaccaggccgacatggcatccgcaatgcccaccgcaggcggactctatttctggacacactactactcatccgagaaatggaagaacccgcttagttttctcgtcggatacagcaataccatcggcctgatcggaggcgtatgctcgatcgactgtgagtcagatgcaatctcaaacaaaaagcccataattaacacatcctcatcagatggtttcgccaacatgctcctctcagtgatctcgctagcccgcgacggcgaatggtccgccacacgaccagtcatatacggcacatacgcagcaaccgtcgtcgcacacggcttcatcgccatcttcttcgcccggatcatgccgaggatccaatccgcctgtatcttcctcaacatcgctctcgtggtggctaccgtcatcgccctgcccataggcaaagcgaagaatagcccgcctgtcaacccgggcacgtatgtctttggggaggtacagaatttcactacttggcctgctggatgggcgttcatgctggcgtggctctcgcctatctggactattggtgcgttcgattcctgcgtgcatatgagcgaggaggcgacgcatgctgctcgcgccgtgccgctgggaattatctcttctgctggactatgtggtattcttgggttcgtttcgctggcggttattgcggcgtcgatggatacggatatcgaggggattctgaattcgaagtatggacagcctatgactcaggtatgttttcgtcttctttcttttatggggtcgtactttctaatctgggttctttatagatctactacgacgcccttggcaaaagcggtgcccttggcttcatggtcgtggtaatgattgttcaattcttcatgggactgagtattgtgagttcccgtcttaccatctactcgaaatcccagaacccattcactaatccacccacccaggtcctagccgcctcccgccaaagctgggccttctcccgcgacggcgccctccccctatcctccttcttccgcaaagtaagccaacgcaagttcacacgctaccagccagtccgcatggtctgcggcatagtactcgcatcgataatcatcggcctcctctgcctaatcgacgaagcagccgccaacgccctcttctcgctcgccgtagccggcaacgacctcgcctggctaacgcccatcctggcgcgtctgctctggggcggcgagcgcttcgtccctggtgagttctatacaggcgcttatctcagtaagcccatcgggtgggttgccgtcatctacatgatgtacgttattgttcttactatgattcctaccgaggggccgaatccgtcgcgtgagttctattactattcccggtgcttttgcttttgctgacagtctgtttgaagctcaaaatatgaattatacggttgttatcaatgggagtctttggcttggggcgttgctttattattatcttcatgcgaggaagacgtataagggaccgcagactactgttagtcccgaggatgagggcaaggctttggagcaggactcgaaatagttgctaagatatagatagacgtttgggtgggacttcggcccgataatgctcggtgaggctttgttaactattcctatagatcaagttcatgtactcaatactacaagtttactctatccccattggttggggagacaccggggatttcagttccaaattcagatcagatttggccttcaatatcgctaaaatcaccctttcaacagggctaataattgtcgctagacattaattctcgttcttctttattttttcgtttcttcatcatttcttcgtcgttcttcgtcgttcttcatcgttcttcgtcgttcttcgtcgttcttcgtcattccttcgtcgtttcgcaaaagcaattacccttctgagtctcattccagactcaacgcatagatgaggatgcatctattcaggaatctcgaggacgtagcggccaacgatcttgttttcctctggataacatagattagcatatggcatatcaagtaatcgaaacatccaaacttacccatgagcttgaacacctcaggcagttctttcaggggaacaaccttgaaaggagccttgatcaagccacgctcgtagaattcaatggcctcgacgccatcctggcggttaccgacgtagctacccttaatggtaaccatcttgacaacggtttcgaaaacaggggccttgaggaacgcatgggcgggaaggccaatggcaacaatagtaccacgagcgcgaacgtactcgacagcctgctggaaaggcttctcggagacagcgagcaagagcacagcgtgggcacctaggccaccgggagtagcagccttgacatctgcaatgacatcggtagacttggtgaaatcgatgtaggtctgcacaatatattagcatgatcccaaaaagttgtccggaatagaaaagcgtacctctgcgccaagctccttgcacatcttctccttctcctcgccaccgtcaatagcaagaacgcgcaagcccatagccttagcatactgctgcgcaagcgaaccaaggccaccaccagcaccaacaatagcaaccgtctgaccggggcgcgcaccggactccttgagacccttgtagacagtaataccagcacagagaataggcgcaatagcatcaagcggcacatccttgggcagcttcgaaacgtgcgctgctttaccaatcgcgtactgctggaatgtaccatcaacggtgtatccagacagctgggcatggggacacaaaggctcgtcggaggattcgcagaactcgcatgcgagacaggagccgttgagccatttgatgcctgcgtggtcgccgatttcaatgtcctgcacgagagagccctttgcgacaacaacgccggcgccttcgtggccgccgactaggtgatccttcacggtgaggggccagtcgccgttcatggcgtggagatcggtgtgacacacgccggtgtatcgcatcttcacgaggacttcatctgcgcccggctttgcgacggggatttgcttgtacacgggtcgttcgcctttatgttcgatgatttgcgcccattgggtctcggggatggtcattttggtcattttggtgggggtagaatacttggttaaatgatggaatatgtgtgaaggtaggaagaattgtctggaaagtgtttgagtgagagataatggtaacacaggaaaatacatgtcggcgcaggtgttttatagcaagcgcattgcctgatcagggcatcggctgctttaactccgtgagctcttcgaatccatccggttctctggtagattcggcgtatctctgtcattctcacacaatagcctcggaataccgtggaatagctacataatcggctttgtatccacttcggctcccgtttgcggtatacagtactccgtctacagcgcatggttattgtccgaacatctagaccttgacgacttcgtaactgtccatctctatcgccaccacatacccaataggtgtccggtgagatcgaagcatcactccatgtcagcttgtatgcatccatgaaacgggaacctgcccatcgaatcccatttggaggaaagacgaaccgcaattggatacagatacacatatgggaagaccgacgatcacaactatgacagaacatgtccagacattgtgccattccaaggttgtgctgtccacgtccatatggggagtggaggacgtcatctcgaacatcaggccatgcggcacgcggggtatggccggagatttagagatttcaagctgttcatggcgaggctataaatatcactgagatttgaatcagtatatataagtgtctcgaccttaatagaaatatggtttatattcatcccagtttccctcttccgggaaatgtcgatctgagattggtggttgacctgaggctatacatatcctttgactctttagcttggctattataaggttggttcttagtatatgcattatatgcatatacagatctattataatctattatagatctattgatgacatatgaaatactttatatccaacgtggtaggtttgagttataacttataagctggtagctctggagatgtctatgacccagacctcttatataccgacgaatccctatttagtaattctctgatgtataactagtcataggctaaacaagataaccagattgatcttcaatccaagctctaaaacataaaaacaaagaccgaccgactataatcccattgaatccaatagaactggtctccacagggaggtggatagggcgatctcacgataaactcggatcagcgaaacagatttcacgtcaaatgcgagtggaagcgaggactcgctaattatctgaactcctgcacttaggactagggatattcaacacttgaacgcattggaacaagacattccatgttgatgatgttcgtcctcaccacctctgtgctccacggggtgtttgtatggactctgagcgagatcggggcacaacctgggaattctcgaccagctagaaaagaaaaacgatagagaagaacacgaaaccattgaaaatagtcgtctaaaacacagaaatcaccgctttccactgtaaaaagcccgttcggatctaacccccgggatgccggagttggtgaaataccccagacgaggaagagattcacgagaaatgccaaatctcgtcaactttttccccttttacccttacgagtcgtcgtcttcccctctttcacccgacttcatctttcgtcctcagttattcctccattcccccattcaccccatctctcccttctcatcctcaaccaccgcccctgcatcagctcgcctaggcccgcgcattctctttcttgggctccacggaaacttcccttcttcctgcatcttcccaccacaaacgaatccatccctccatcaggtatttatggctcgctttcttcctccatctcttctctttcatccctcttcactccgaaacagatcctacctgaaaccaacaactgacaccgcgtcactagaacgccggaacccccttgacaggtgtctctgagcaggggtcttggactcttcttcctcaattcccgccccgaccctatctcgacccgagtgaccaacctttgacgcgctcgacccgtaaccggggaccgcggccatcatgacgggccctccgccatacaacgcccagtccccgactcagcagcagcggtatccggcttacacctctccgaataagaaccacccgtattacccaagcaatgaaccaccgcaaccgccgcagcagtaccaccagcatcctccgcagaccccacccgcatttggtccatcctccgtcgcgcgaagcccgcacttttcgcacgcgtccccaatgccgtctacattgccgccgcccttgaacgggagtgcgccacatcacccgtcgcacctggagtcttcgcaataccagggacattcggcaccgggttctcagctcccacttccgcgcccttattctagctccgtgatggcgggcaacggtgcttcgccgtatggatctgcgacaccacatggacatccgcccagccacccagaaggccattcgcaatctcccaccagggagtccgaatccccatatcggatgcgaggtaatggtatcggatatggacctccgatgatgcgagagccgagaccggcctcaccgcaggaagccgtacgcattacccggacccttgcaatatctgctggtttactaactcatccctgcctcgcagaaacccgctcgagccgcagaccccatgtcgttcgccagtattctttctggcccgtcggacgatcagcctgcgagaaagccatcgcctctcccggtccccatgatctcctcccacacgccgcatgctccccctgtctttatacaccggcacctggaacacactacacctgtagctattcatcacaaacacgagcaccgattagactttgatagacacatcgatggcccgagaccaccacatgcgaccaatgggttcgtcaagcccgatgcggaatacgctgcacccattcctcgtgcaccgctccgaaaaccattccctcccggtgtggatctggagcaggtcaatcgggcttcagccgagatcgatcacgccgagaagagcgacgttgaagatcctggcttcgacgcagaacaagagcggtatcgggagaaaggctacaaacggtcgttggaaagcagccgcgcagaggaagtgcgacgaaaggtaggtcgtctgaaagtcgttccatgtccagtcaatcccatactaacatatgctcagcgtcgccgcaacgagttcctcatcgatctaggtagatccttcgaaagacaggccattcttggcaccgaaagattccgagtgctcaacgagggtgctgtcatggctgaagttcaacagaaggagatccaggatgaaaaagaacggaagaaggacatgcagcgcaagcgccgtcgtgaaaacactgtgcgccaagagatgcagaagaagctggaggctgagcgcaaggcaagcaaggcccaggaacccggagaaagggccaagttcctgcgcgaagccgagcgggcacagaagaaaatccgcaccaccaagcgcgctctcgaaggcggcgatggccaggatgagctcggtgaagtcaccccgcttgctcccaatctcgaaggcgggacgaccagtcaattccacatcggccgttcctcgcccagccgacgcaggtcgggccgcgccggtcctgtcactcgtcccaagaagtccaaggagcagaagcaggccgagaaggatcttgccgaggcagcttggaatgctgggttggacgacgagctgtatctcaccccaagtgcgagaaaggatgttcgacgctcaaaggagggtactcccatctcgcagctacactacgacagtaaaggctataaccagatctacgagcagatctggcgcgatatcgcacgcaaggatattccaaaggtctaccgcatcaaaacctcctccctctccacccgccaggagaatttgcgcaagacggctcagctggccagcaagcagtctcgcaagtggcaggagcgcacgaacaagagcaccaaggatactcaagctcgtgccaagcggacgatgcgtgaaatgatgtctttctggaaacgcaacgagcgcgaggaacgcgacttgcgccgtgtggctgagaagcaggagcttgaatcagccaagaaagcggaggccgaccgcgaagcaaaccgacagaagcgcaagctcaatttccttatctcgcaaacagaactgtactcacactttatcgggcgcaagatcaagaccgacgaagctcaaggggacagcgttgttactgccaccggagagaccatccaaccgggcaagccaaatgctcacacaatcaatcttccagacagtgtggccaaccctaacgccaagaccactgcattcgaggaccttgacttcgatgctgaagatgaaaccgtgcttcaacaagctgccatggctaatgcgcaaaacgctgtgcaggaagcccaggaccgtgcccgcgccttcaacaaccaaggagagggcgacaatatggctgcatttgacgacggcgagatgaacttccagaacccgactagtctgggtgacattgagatctcacagccgaccatgttgaatgctcagctcaaagagtaccagcttaagggtcttaactggcttgtcaacttgtacgagcagggtatcaacggtatcctggcagacgagatgggtctcggtaaaaccatccagtcgatttctgttatggcttacttggctgaggtgcataacatctggggtcctttcctggtcatcgcgccagcatccacactacacaactggcagcaggagattacaaggttcgtcccgaacatcaaggtgcttccctactggggtaatgccaaggaccgcaagatcctgcgaaagttctgggatcgcaagcacatcacgtataaccgtgactcggaattccatgtcctagtcacctcttaccagcttgtcgttcttgacgcgcagtacttccagaaggtgaagtggcagtacatgattcttgatgaagctcaagctatcaagtcctcttcgagttcgcgatggaagaatctgcttgggttcagctgccgcaatcgtcttctgttgaccggtacgccaattcaaaataacatgcaagaactgtgggccctgcttcacttcattatgccaactctgttcgactcccacgacgagttcagcgagtggttctctaaagacatcgagtcgcacgcccagagtaacaccaagctcaatgaggaccaactcaagcgtcttcacatgatcttgaaacctttcatgttgcgtcgtgtcaagaagaatgtccagcaagaactcggagacaaggttgagaaggacatcttctgcgacttgacataccgccaacgtgccttgtattccaatctgcggaaccgtgtcagcatcatcgacctcattgaaaaggctgccacaggcgacgacactgatagtagcacgctgatgaacttggttatgcaattccgcaaagtctgcaaccaccccgatctcttcgaacgtgccgaaacaaaatctcccttctccgctgcatctttcgcggaaactgcatccttcgttcgtgaaggaaactttgtcgatgttcgctattcgactcaaaatttgatcgaatacccgttgccacgcctattgtgcagctctacaggacgacttgatcttcctggttctgataatccccgtgtgggcttccaaaccaagtacctatcccagctgatgaacgtctggacaccagaaaacatccagaagagcgcacgtgacaatggtgcattctccttcttgcgtttcatcgacacttctgcaggggaagcaagtgagatggcacgacttggcgtctacgaacgagcagagcgtcgtcgcagcaagccaaacaggctttctgccttgaatgtcatctatgatgagagtgacgatccaaagaactcggtcctatcccattcgatgttgaatattgttgatcgtaatgatcaacaggctgtgcgagatgtcgccattgagggccgaatgaaggatctcatgactgtttcacgctcctcattcgaagatcaaggccttcaacttattgagccttgttctagtcccaaagcctcggcgcctcccatcaccatgtcctcttccggccaacagacaacacgggaaacttaccaagctttgttcaatccctccgttcgacaagcactgtctggacactgcagcaggcaacttgaggagcagatcctcatcaagaaactcgatcctacaccttactctcacgctcctatgctgccgccaccggtttcactcaagggccgctacagccacatcgaggtaccatcgatgcgtcgtttcgtgacggattcaggcaaactggccaaattggatcagctgctgcgggagctcaagcccggtggtcaccgcgtgctcctgtacttccagatgacacgtatgatcgatcttatggaagagtacttgacataccggaacttcaagtactgccgactagatggaagtaccaagctggaagaccgccgcgacacagtcgcagacttccagtccaacccggatatcttcgtcttcttgctgtcaacccgtgccggtggtcttggtatcaacttgactgcagccgacactgtcatcttctacgactccgattggaaccctaccatcgattcccaggccatggatcgcgcccatcgtttgggccaaactcgccaggtcactgtctatcgtcttatcacccgcggcaccatcgaagaacgcatccgcaagcgtgccttgcagaaagaagaggtgcaacgtgtcgtcattactggcggtgcttctggcggtgtcgacttcaacacccgtgctcgcgagaaccgcaccaaggacattgccctgtggctcgccgacgacgacgaggccgaactcatcgagcaaaaggagaaggaagccatcgaacgcggtgagaccctcggcgccaagggcggaaagaaggccgctcagaaacgcaagcgggatcttacgctggatgacatgtatcatgaaggtgagaacactcgaccactccttgttatgttttaacgtccatactaatcgattacataggcgagggtaactttgacgacgccagcgccaaaccctcaggggcggctacgcccgccgaggaacctgtcgaggtaccttcagcaacgcctgcaaaacgcgggcgcggccgtggccccggcaaaggcacgtcgaaacgagctaagaccacgaaagagcgtcttcgtctgattgacggcgacggcggccttgattaatccaatgactgtcaaataatgcaactcggggcggcgttcaaggtcacagctacttctcttattattttcttttgtcgattggtcaatccaattcctccttatcttctactttccctctttcccagttcttcttatgttctcaaatggcagatacatgaactgctctgtattatcatacgaaccttgactatgttctgaaacagcgacgtgggctcagtatggacatttcccaaacaaagtctagtggctgagggtggttgatgcaatgatgaaaagatgattttctttccccctacgatagactcgatcctggcttttgctttggcttgtggctcatgggtggttgtggcggtctctgtgaacttggtgtgatttgttctttctttttcccccattctacattcttccccttttttccccttctttttctattttggctttcctgactcgcttgtatgttcaatgttcaaaaagggcgcgagtgttttagtttggttatgagtgtcaatgtattggtttgatggactcctatgcccttggtcttggtttgttcttgaaagaaattgtaggattaggtcttgtagtgaggtgtgcttctaggtcaagaatggtgatggttgatggtaaagttgtatacttagcttgccagccttgctcgtcattcagctctttgagcttataatgtcccagatactaggaagctatcatctatgtacatatggtgggcttgagcgaggattgtaccggtagccctcctcttgctgatatcagaagaaacaaacatgatgcctcacaccaaagcgaatgccagttctcaaacaagtcagccggaaataagagacgccgttcctgcccctgccctcatcatcacgttaccatctaattaagcgagcccacgtcgttgtttgtctcatttgtgaatagtggcataaaccgaccgcccttaagatacctataagaaggcagccctgcccccagaccttcctcttcttttcttccttcttcagctcctctttgccttctggcttagatcttgtgtagtatctgttcttgtcagcttaatctctgatagtcctgcattgcgggtcattcatgattattctaatctttggacctcgcgacttggtctctgtgcttgcgcatgcctcgttgcactgtgtcattgggcttacactacccccgattgatgcgaacttccttttttcatcaattgttcggcttggctgggcgtttggagaagatggctgtttgggttttatgttcttgtcgggtgggtccgttgtttacattgttgattaacagaggtcaagaatactgttgtttgaagttcctattacatgtgtctatcaacttggtccttgttgtaacttactctcatctcagaactggaggtggggagaagatagctttgtcttggggtcgagatacgatagctctctggtccctctctcttctcgtctccgttccttttcattcctagaatgagtacattgtttctctaactgaactacagctactgactatctggtaaacacgatcttgacacaatggaacttccacccttctctcggggtcaaacccgtctttcattaatctgtggcctccgagggacaagtgatgatgctgagatgaaattacgatgaacttatccacaaggagcataccagttctctactgggtgatggaaatattatcccaatgatggtaagcatactatcttctgccttctgttgctaataacttctggcagaacacaaagcaaacgcgatttcttctttcctccccgtcacgctccatcgccccaatattcctccggcagaacatccatctgcccccatcaactgtcccgccgggatactggggtgagtatgagaagacatagttggtatccttccaccgacggggatttctcgcatcgctgaacgaaatcggaatcaaaaatacattgtcataccataatcagacagacgatgaggggtgttgcccaagaaagaagaggcacaccaatgctcgctctcggctttgcctgttcgttttgggtgccaggaggaaaggaagagggaggggacaagctatctacttctagctaccgtgtgggatctgacagaccgaaatctgccatgtctctcgcggggagatccctcctgcgcaattgactatgctcctctggagttatcgagctgcaggagatacctcttccttcagaaagtgagatgaactactacaatgtaggaaaggaatccacgagagattgatgacatttgtaaaactaggataacgatctctcctcccaggatctgtccccactttgtagcagtaagcttagtggggggaagatagatgatgtattatgacctccttggtgaggttaactatgaagctatgactaagctaagcttgtgacactgggttcttttctaatcgtgtaaccaacacattccaacatcgaatgttccgcttggccactgtgcctgtcttcctgctttttcttctggtgggggacaagtttttggttggctgcatcttagtgtaggtccgggagagggaaatagctgacacagcaagaggttcccttgtcgtggtctaggcagtgggttagttcctcataggaagagataacattttgaaggtggaggctagcttacggaaccaggcacttttccgtgtctgctcagccaatcttggaagaacaaaggggggctgcactcatctctttctcacacaagatcctccacaagatcctcgagctagatggggttctcattcagccatatcagcaaaccccaccgagtatggtgcgacgattcgaggtaaatctccctcaactccgccgcaaattcgtccagctctatagcacgggcgcggtcgtggcgagctgggaaatagctccaaccacacacacaccaacggtatagtggggatattatttcgacagcatttatgtactgccatgaaatcctcaagacagagaaatcttggaggccttttgtgacattcgagggtgactgccaccaaccaagaaccatgtattcctgcctcaaacaattcggcaaatgttgagatgcggaacttctcatgaaattcggggtttcgtggtatagagattggagcggtgctgtgagaggaatcttttcactgctgaacaccatgcatatagtcgttcaggtcgcttgggtattgtgtgatggtgactgcgacaagaacggtaaatggctttctgtgctgtatccgagtgcatttgcaaaaggccttcattttctttatttgagcctctgtgactgccaacatttcttctgtagctctggctaaacgagcaccgatggacaattcggtatcgtggaatgccccgaagctgcgcagatgagaagacatgattgttgttgagaaacaacccaggaacaaggagatggaggaaggggatgcgtgccaattggttctgatgtctccattgattacttccgtataatctttgatcactcgggaaatttctctcaataccaatcggcttcagaaaccttgcacttgggggtataggttgcgatccgggtcattgacgacttcgagagtattatcgctatcattgaagctccatggtatcggactgcggtacgctttcgccactggcagttggaagatgaccgtgtgtggtcataaatatatatataacttatagcgctaggaatatttgcaactaaagttctaaatttggcgccttggtaaaagttagtcctgttcacaatgagtacttcaagataactgatctggaagtgagacaaaagcgaatggaatctccatctgagcgagagatactttcttacctatgcgtcatctcgcttcttcaggggtgatagcatcatccttctttcgtctctcattcccctattctctgggatcgggaaagggacatcatgtcttggcagttcatcaccattagcaatctctggcattttgagtcacgatatgataaggtaagagggagcgagacagaaaggctatgatgaaatataaataggtcgagcttcttcaggtgttgccgggatgaagaagatggtctatgggcgtttataggcataacttataagcaaataaggcaataacaaacaaaatagaagtaaacacaggtctgagaaaggagacaatcggatgtccatttcttttctttttttccttcctcttctctgctctctttcatttcgaccgtccgctccgcactactacagtcccagccagcactccattggccaagaaatggatgcccccaacgaggaacattcgcgaccattctgaggttacgaaccggacatctccacagagtgcgatgagatcaactcgcttgaaggctgcagcaaccaccagaaagcccgagagccacctggatacaccgtacatacaccgtacgcccgtgagatcttgcggatgcacaaggaagtggtcgcagcccgagaagagtacaacataaagtacgcttctctagaaaccagaatggaagttcgctgcatcaggtgaccttgggcccctttagccagagatacaatgcatcatcattatcttccccggagctttgtaccgttacagctcacttcgctttgacatatccctacctcaatacttcattgtcatttctcattgaattctcgaattttcttatattctgccccctttaatataagcccgcacccgtaattcatgtaatggagccagaatagcgaagtcatcttcattaccgatggcgtgttgatgaatatcaacccgcttagggacgggctggaatggttggcctaacgagttcccgtcacatttttagctacaagtctcgtgagagcctgttagtcgagtctgtacagtttgtggttagatattctgcggtgggattctatggagtgtaatttgcgttagttgattggtttctacggtacaagacgctggtgcttaccgtgagcattgttaggttttggaggcgggggcgggggcgtcctcaggtaagtgatgaagatcaagttcaaatataccgtaaaagggtccgactgattgacacaatgattacaagcttgactttaccctaaacttgaaagatgttgatattgtaggtccacatggatgagtggggttgttgttgttgttgtattatttcatgtccatcgagatatgggcgaagcccgtatttctatgacctcccatggggtatggggacgtgctaagctatggtattatgtacaaagttgtgcgcctagagtaagcaactccttccaatgaatgatctggctagaggcctgtcagctgcccgtccttctccgaactgtgaaatggatgtaggatcttccgaatgcggtttcccgcctgccgggacggcggcccggcttgcgtctgttcttactgcggggtgcagttggtgctttggtgacggggtttagcccgcctgcttcgcgaggcagtatgccggtggatgagtagagtgttaggaaaatgttcaccataaattatagtccacgagtgtataagaacactttttgtagctagatttctttctatttcgaattacaaaattgatagaaagtcaagatgatatgctgaagaaaccaaatatgactttgcttgacaggattgcttgaatgtagcccgggattacgcacttacgtacttcttacttgcagcgcagtcatttatattttgatcctgctttattatgtctcatttatgctaagcattgaccacaagctcaagcatatttaaacggagcaccttaaacctagtatcataatagtcaggcctcgttgagatttcggagagcacacgctgtctgaagtggcgaggcgtttagggttatccacgcaatgtgtcatttttcatgattatataatcatgcaaaatctggcagaatttagaatgaagtggacggtgagcacgaccccactttggcaagaaaagtctataatgtggagtacaactagccctaatcaggtagtcttggcgccactcactaactatggacatatggtatgatcgtagaacaccgatgccgggccaaattcacccaaaagatcggggtttacaaaaaagataacggggatctaagctgacggggtttgactgcaacacaagttgccgtctcccgcaaagcccgcggtagtgaggcacatcgggaaggaacatccgtacctcgggatttgcctcggcaggccaatcggagtctttcgtatgtaagccatccggatcagtcagcagccccaattgattttccctctggttccgccggctctcaacattgttaacttgtgcaatctcctaaactcacggggatttttgtgtttggcttcttttcctcttcatctctttggctcaattcaactatggaggctcttttgcaacagtctcgcactatgtgccctttcctcaagcgcacatctcccgccaccctccgcactctctcaaccgctactcgtccctgcactagcccgggcggtggaaccatgtccaacctgcaggttcttggtcgccgatgcccagtcatgagcaaggctctggctgtgcagagcgctcgtctcagtggtgccaagcgcttcacctcgcgcgctgcgggagtcgcttccgtccagccattgcgggttccgactggcaagcgggcgttgcataccaccggtggtcatcccgccagtctcgcctctggtggatacgagaagaacgatcgaggaaaccctaacttggccacgctccgctcgtcccctaccgccgccagcgccagcgccggggccgcagtccgcggtccccgcccggaagcgccaaccaacgaaaggttcaactacgacgatttctataacgtggaattggagaagaagcacaaggacaagtcctatcgctacttcaacaacatcaaccgtctcgccaaggagttccctcgagcccacactgcctctgttgaggagcgtgtgactgtctggtgctcgaatgattacctgggcatgggccgtaacctgcaggtcttggactccatgcacaagactttggacacctacggagccggtgcaggtggcactcgcaatatctcgggtcataaccagcatgctatcgctctagaggaaacacttgccaagttgcatggcaaggaggctgcattggtcttcagctcttgctacgtggctaacgatgcaaccctagcaacactcggtagtaagatgcccgattgtgtcattctctcggacagcctcaaccatgcctcgatgattcagggtattcgccactctggcgcgaagaagatggtcttcaagcacaacgatatggaagaccttgaagccaagttggcctcgttgccacttggtacccccaagattattgcctttgaatccgtctacagtatgtgcggatcaattgcgcccattgaaaaaatctgtgatctcgccgaaaaatacggtgccatcactttcttggatgaggttcacgctgtaggcatgtacggcccacacggagctggtgttgccgagcacctcgattacgatgcgtatgcatcgcaggatacagccacccctcaaagcaccaagggcacagtccaggaccgaattgacatcatcaccggtaccttgggcaaggcctacggctgtgtcggtggatatattgcaggctcggcagctatggtggacaccatccgctcccttgctcccggtttcatcttcactacttcgctcccaccagcaactatggctggtgcggatgccgctatccagtaccagtcccaggaaccccgggaccgaattcttcaacagctccacacccgtgcagtgaaggccgctttcaatgatttggatatccctgtcatccccaacccctcccacatcgtgcccctcctggtcggtgatgcggagctggccaagttggcctccgacaaactcttggaggagcacgacatctacgtgcaggctatcaactaccccaccgttccccgcggcgaggagcgtctgcgcatcaccccaacccctggccacgtgaagcaccttcgcgaacacctcgttcaggccgtgcaggccgtctggaacgacctaggcctcaagcgcaccagcgattggaagcgacagggcggtttcgttggcgttggcgttgaaggtgccgaggccgccaacctgcccatctgggaggacgcccagctgggcctgaaggctggtgagaccctagagaccgctgtcgctcgtgagttcaacgacgcagcttcccagaccaccgtgctgcccctgaaggctgctacccctctgaccgagaaggcttactcggcagtaaactccgctcccgttggtgtggttgcctagagcagacgaacgccgtcttttacgcttctcggtttttggggtaatagctacattattcccgtccattcatttattataatattgtatcgtacggacataacttgacgtatgcatccgtcttcaacataccacatattgatgtcatatcaactgtctgcctttattcaaatgatgtagtcatcttacagcttggattggccgttaattgcgcttttgtctgttgatgtatgccattgatttggttggcaggaccaagacggatgtcggatatcctgcctgcatctatattgatcgagtgtcatttattgggctcaagtgtaacaggttggaatgaacagagttgaagtggtattttctttgcatttcatgtaggcttcggcttgtgtagtatatgttgtaagtgctactatggaaatatggaaatggccagtagtattagggcactgatatatatattcgccttggatttgaactgcctccactcaattgcaaagaagcaatttcaaataagtttattttggatttataagtctttgaatagaaaaccaactggaaaaccgggcgaatcaatctagattctgctatatatgctagtagtgaaatagtataacaatttgtataaatactaacaatcgggcaaagaggcccaaaagtccacacagaatcaaagaaaaacgaccaagtaaattcatttggctatgtaacaacgtctcattgatatagaaacaggtagaagtaacaatttttgaaacacacaaaagcgccatatattcaaggaagcctgacaactcaagaccgacaaaccaatcaacctccctacctccgaccaccacggctaaccttagggaactcaacaggcacgcgcaagcgagcaacacgacgcgcatgcgcctccgcacgtccacccttaatattccacttggcgaactccgtctcacgcggcttatcaatgcgacaaccgagttcacggaagtactggtgaatagtatttggatcgagacgcagatcatcacgcagatccgaaggatcagtcgcaagctcgttgggcgcattaccaccgagcgagctggagccaccgtcgcgtgccggctggggcgggatatgcagcgagagcgcacagatggtagtttgcaggagggtgaagtcgttcttggagacgtagccgccgctgggcgcgaagcggcgacgcacggcatcgatcacggactccggaagcaggtctgcggaagcggcgtccggtgcagcggcgccgggcttgggcttcgtgacggaccccgtggtgtttgacaggatgcggcggaggtcttcgcggggtgggagacgcttgctgcctgggccgccgcccttggcgttcgcgcctgcgtttttgagacagcgtccgaactcgattagcagctggatgaagcggaggacttggaggtgggttatgttttcggagttgacgactgcaccgacgcggttcgagacgtagcgtgagacggttgtcacgccaagaccggcttccacttgtgacttccactcgtctacgccgtttagttggctgagggttgagtggctgcctggaacgagtgtctcaattgtgtagacgtcggaggggtgcgagacggctaggttcggggttgggaggggcttggcggcttgcacttcggcttgcatggcgagggccttggcgaggccggaggctgtgtttgcgggcagcgaggagatgagggctgcgccggcttgggggacggcgccggtgggggcgttggagagctgggcgttctcggccatggattgcacggccttgcgggattgtttggttccgaaggtgtttgttagagctgtgcgttgggcgcgcatagtgttctggtgctggttgttagttggatgccgttgatgtacggacttgcggatcgaagggcataccatctcttcatctgagtcgtcctcgggcttgcggcttctcactgctcctcgcagtgtcgctcgccgcacctccacgactttccatgtcttgcgctctgggtctataactgcgacatagtgcttcacttgggagtcggtatcatctcctgtgccctcacggccgacaaagtccaacttagggtggtctgaggactggagcagtatctctgaagagacaatgcccgggttccgagtcgatgccgcagacttggagacattggcgcggtttttgatatatggattccagtggagggatttcgagctttgaagaccaggtgtgtcgactgtaacgcaagaattcgattagcgatggtttacagcctggatgaaagccttcgactcaccaattaccggtgccagctcgctcttatcttcaacaacgctggcggccagcgggggcagctgctgcagcgcgggctttttgcttgggcgatcattgcctgatgaacgcttccgcttgtgatctgttttattggacggcattatggcgttaaagacgagagacaaagattgtagctctcgagaatcggctctagcgcggtgaaataaaatgtctggacttgtcgggcagaaatttttacgagtggagacctggcaggcggtgagtctacggcttaccgcacacaaaggaatattgacgtagatggagcgatcgcgacggcgatataaagagagctacgaatatttgagaacagctgctcgagaagtagccgagctccagtttatgtttacatctacaatgagtaagaaaggttgcactcatcaagtcatcgattcatctgcagtagctaaaccaagacctccgagctattccatggattttgataaactcccggaaaaaacctctccacaacttttgaccagcccgaagaaaggccgtaaagataatgagaattgaccagtcaccccaatgccgtgctcaaagaccgatggtttgcaccggccctccaacatccacctaaacacaggagcccctccgggtaataaccatgcatgacatcagatcgtagacgtgaatgaatccgaggtgttggaatgtgggtagactgttgttgtaacagcggattccatcaattcgatctgcgatttcgtcttgaagataggccggaaatcgtatccgtgcaggtaactcgttggaatgaggggcgtgtcgcgaagaaacgaaagtcgcaatcgcgtcgtcagttgtcgtgttcagcgttcaaacatgagctcgagcaaagagggctgagatggagggggcgagtagtttatttgctggtttggggattagcatattggttcggcgatcggaagctcaatggccttcacaagaccatcggcgcataatggaatgacttacgatctggcacgcatctttctgcgcttgcgcttgagacgacgtgtgcgcttctttctccacttagctctcatcttcaaactgttgactggttagtgcattgcgctcgaggaaaccttaagcttcaggaaagctacttacgatttcgaggatgaaacagagatagtagaaagaaagatgaagtgtgggcggcccgagacgcatttacgtatggtgcggctgactcagctgcgctcgcttaggtcacacacgtgacacttcaagcttccatctgtgacgacacatgactatgcccgattaggaaatttgatagggtttccctccatagaagagtttaagattacagaccatttgaaaataattgatgtcatacgaagcacgagtgagggttttacgatgggacaattaaaaattcacgagaagagcaatgccattactattattgaatagtatatcaagtaaccatcatatagctccgaaatcaagacttttgatgcgaatgtttcccaattatagccaaccgtatgttcgttaaagaaatataccagaatcgtcatcactcatggagtttgcaagatccgcacggcgagatccacaaaattaaaatgagaaaatgtccgccatacgaaagtagctatccaaactggatattttctcagtacgtgtaccgatatgtgggcgccaagtcgccgagatattcctcttcgtcgtcgggaatcgtagcaggatcaaccgcggcacggtcacgttttctgttctcataccacagggatgccatgtagctcgtgcatgccagagcagcgaggcaaatgaatgagaggcatatgatatacccggttcggaaatccgtgacaccattctttacaacaaaagaaaaagtagcgatgattccaccgatgttgccgaagccaacctgccatgcggttcccacgctgcgtcgatgatgaccacccaaattcatggcaaaccagcatacaatgaccggcatggcgctgtaacagccagaggtgagcaggaacagagcgccatattgcgcatgagtattgttgtggattgtcatgagcataataaatccgacaagggcgatcgccattggaatcaaggtgaaagcgaatcggtgtcgcattcggtcagagcaaaaggcgactatcattgagaagccgaatgctgcagcccagggaggaatggagtacagttgtgttttgatcgaactatagccgtaggtctggataatcgacggcgcgaagtatgcatatcctgtatgagagtgagcaataattcgcttaacggaagatggaaatgttttacgtaccgtaagccgggacaatcaaaccgaagtacatgaatcctccgataaagaccttgtctgggaaaagtcagtgcactgcaaatgaatgcaacagggattctcgggctatacttacagtctttgaacacaccgaggacctcacgcttgcccaagtgaacgttgtgagcagccttgccgacatccttggccaacttggcacgcatgtatgtgcgctcttcctcattcagccacttgacatcctcggggaaatcagcaatgaaaaagaacaggatgatcgcgaccacactggtcaagacgccctcgataatgaacacccagcgccagccactgtagccacgcatgccgtccatctttgcaattccactggcaagcagaccaccgaaggcgccggccagggaagtggagctgaagaagaaactgaaacgcttttgagcctcagagcgtgtgtaccacatgcccaacaaatagaagcctggcgatcacaattagcacctgtcttaggatgtactgttggtatttgctcttacatccagggaacatgcccgtctcaaagacacccaaaaagaaccgagtggccatcagtccaccccagttctttaccagaccctggaagagcaaggtcaagccaaacatgaacatgcatgccgacactaattccgaattagcaagtcgccctcaccaattgcccctaaaccaagggcgcaaagggaccaaaacacttacgccagacatggggcttcaacttcttgagcaagatgtttgacggaatctcaaagataatatacggaacgaagaaaattgtgagcgcggtgttatatttcgttccatcgacgatgtccaaatccttcttgagtccgagaatagcagcattgctaatattaactctgcaggtcgatgatgtcagatataagcaacacctggtcacacagatacacaatggtcagcttaccgatccaaaaaggcaagcagatacaaaatgcacagacagggtaggatgtgccaatcgaccttggcttgcaacttgcgcgcggtggtagtcgtgagaggaggcagatcgccgtccgtgtgggagctgacctgactttcggccgcgtcgatgtgctctttgctatagcggggtgattctgcgcggggggagtaccttacggtcagcatgtgttgacaaggatgtgctagcgcaagcgcgaattggccaaaccctaacaaggacggggtatatgtataggattgaacatacctgtgacacccattgtgagatgcgaatcgcactaggacactgcgcgcctgcttggaaggacaataataatggggatgatggaagggaaaagggaaattttgacttttaaggctcgaattcccaagcgcagctcgccaatgcagggatgttaccgaggtgctacgctcgatgccgagtctcaaacgtggggtaacttccggagttacggagaggaaaagcaaagctgaaaaagcgagtggtcaatcctggcgacttaaaaagattcgagtcacagggcgaatcatccctggagatatccccggacgatcgaggccccgatctcggcgccgatatgcattccgcgattttagtttttttagtttctttagtttattaaattttcactttgcacttctagttccttattgattcggcagaacctcgggaggagacaggtgtatatagctttcatctttcaaatcttaattcgcccttcccacggaggactacatgcttagaattcaatcagtcgtttccccgcaaaatggcttcaagatcacgtgattcatgaacaggggtacaccactttaaatgtgaatatccacttagccaccctgggaagtgcgggggggtttggtatttttgtatctgctgacagtgactcagaaaaagtgttgactcatatttttattgctttctgatacggatatactggccgttgtttccaaatttcgactagtagagaatcgaattgctagtactccgtacaacaattaccagtacggagtagaatatcaaccgaggtgttgacctttttgcggtgtgactgtatgagttggcgtattgtattgtaacggcggaccaatgaattctctgtgaattgcctttttcaggttagctttaccgcttccggtttagcggctcaataccgtacccttcgatcaaatgaccttgcccagtctctttttcttctccaagggcatcctgtagcatttcacgagatgcatgctgctcctgcatgctgctccgttcacaaatccaatacatcatgtcaagtaagccttctctgggcctagccactccgagtgctagcttatatacacttgaattactatcaaccagccccagccaaaaacagaattcgaaatccccaaggtcctcccatagtagtctcatgtccctctcaattcgtcggtgtatttgatagcacgtgcatatgttccatattgaatccaagctccatgggcttacccgaaataagtaggcgaaggagtccgcttctccaagtcttggcagaaatacttttccgaagagaaaggctcagaggagtggtcccgatccacactgtaattgccgtcactattgattatctcgcagttagtccacaattggccctcgaggttggaggctgcttcgtggttgtgtgctttgctgattggttccttaagtaacgcctccgtatgtgtgatcaattccgtaagcgtgcgatattggttgtgccagcacttgtcgatgatatcgtcaatcagcggatcatgatcgagcttcggaaaatttcatgtcctggagtaagtccatgaccttgggtccatactcgtaaggatcatcgccaagacattgattgccataaacctcaaatccatagttgatcaaatagtatagcgaaccgagggcgaactgctctgttcgagaacctagaaagccggcagttcctgccattccttggtctgcttcgttactattaattagtcttcctcacggacaagggcaagtttcgaaatctgttgcaaactcggctgtgcaatcaaaatccgacagtttagtcggttacgatcaagtaggatgttctctggtcgcaagtcaccatgagcgaggttaagcgatgcgagaaaagcaacactttgagcaagatcgttcatccctgggtgcataagagatcagtgccttgtaaagtgtatagaggaaacactgcactatggagggacatggtggatgccgggatataatcttgtagattttgagttctttgcgaaattgctctctctcttcctcgccggacttaggaaccttgaccacgattagaggatgagcctcatagacgaaggagagatgcctcctccccagatccagtgcacactagaaaatcgacgttggatatccctaacaagaaggacaagaaaatatacaaatccgtgtctactcggaggagaagtgagaaacgggaaggagacagggggcaatcagccacgtgatcgaggccttcttccttagcgagctgtaggaatcgaccgacatcttttctctttcacttattagcccccatttccgaatttgtcgagaagtacctatgcagtgaagacggaaagcccaaaggtggtttataagcgggcagacagaggatttaagaaatacctaacacgccctgggaagtaggagaaaggtatgattcacaaaagtacaacgtagtcctggtagaggcgaataagtgcgtgcgatgtgaattccaacagggatatccttgtatggcgctggaggatcgacgcgaagtgggcctttttcaaacaaagagaatcaggccgcaaagtggtttatatttttaagggagattggagacaacgtcgaggctttgatgctgaaatgtgtcaaaggctgcataaaacccaggggctctagtcatatactcaatccttggcctgatacagttttccttttgtttgctattttgatttctcctttcccttttccctttctcttttacccttgccatattccatgacagtcacttccaacatacaatctttaagcttgctctctatgttatttctctgtatgagttagcagtgacttattccaatcttcctcgaaccacccttcaactcccgctttcttttgcggtttccctcactaccactaccatcatgagcctcagaagaatcaaggtgcaggcatctagatactttactcgtcgtggatcttgtatattatttgttatcctgatatggttcctcttttatcatcttccagctccgccttccacccagaacaatacccgggcagaccgaccacccccagagcatcgagtagaggacacggcccgatttatctaccgctctccctttcgaaacgatccgaatgttcaatacgaacaacagctatcaaatgcgctggaagagattgaaaaagccgtattgacacaaagtgaggaaagcaacatatccaaagatagaatctggcagatagcgaaaagtcaaaaggataggggggaagactcaatagtatttaaagggaaaaataaggactggatatacacagtaagtactttggccggatccttgctcgactttgactgaaaccacaaagttagtcactgataaaaaggccgtcgagtttttgaccaacgagctgtccgccatccccgaaatcgcaaccatatacaaatcctaccctcaaaatatcctccgagcagacctcctcagatacctccttctctggtactacggaggcttctacgcagacatcgatgtcttccccgctcggagcatcaaagcatgcccagcactagagcctttcttcgcactcacaccagacggatacacaaaaagtacccatcccgatatatcgctcgtagttggaatcgaggtcgacgagccatacgcttcaccgaaattcatgcgcgactggcactggacaaggagctacggactgatccagtatacgatgtatgccccacgacgcttcagcccgcttctccgcgaaaccatcgtgcgggtcctggcacatactaggcaatacaatggagaacataccagcttcttccccagtctggcgtatgacgagaagactatattaggagtcacggggcctgatgtcttcacggatgcgattcttgacacactttcctcctcgcttccttcgactcatccgttcattcaaaaatctgtcgacgcagatgcagatataggggatctaatctctgctgagactggggagctggagaaacgggtaacgtgggctccgtttcatagactccgtgaccctgtatgcattcaggctggtgaggctgtcccaaatgaatccatgggtggattgtgtgtgttgccaatcagtgtttgggggaatgggcagagacatagtgaggcgggagggtttaatcatcctgacgcatgtgtcaatcatcggtttgggcggacgtggaagaaagggtggtgggagtatatatttgggtgaagctttcattatttaatctaggctcgatagtggaatacgaatctttggcatagattgattgaaatcactcctctctagaaatggaagtttataaatttatttaatgtactagtggatgatagtagatgagactatacagcatgaatcaattgagtatgagtgtattgaaaagcgaagattattgacaggagaggaaagaactatatgagtcctttactgccagtagagaaaccaagcagcactaagctgagcgaaggcgaaaccccgatttgccgagttcgtgcttgatccactcaaatgatcatttatagcactggcagccttccttcttggggttctggcaacgagcctggttgacagaacaaccaccacagaacgcacatgtatcgggagcatagcagttaccctcgcctacaacacagcttccatggtggcccacacatttggtgcacgcattggttgctcggccctcaagatctctcgcctaaaatgaacatgttaaaaaatgaccttgtttcacaatgggggttagtcggtaatgtacctggactaagctttgctgtatggagttagttaccacatatagtaggttcaaaggataaagactcactggctctccgtagatgatatcctcgccagattggtaaacttcgagctcgacgccatttgcggcaaaaatgccactctgtgtggccgatgcattggcaataagaagggccaggattgccaagccttggacaaatagtttcattttggaaaggaattgacagttctgagcgctagaagggtgtattggccttcaggtattaattggagttagatttgaccgaccaaggttgatgaccacccgcagacttttatatcttgaatttagtgattcaaaatatgtggtcttctactataatgctggcaaggtcaatatgcaatccttcagttcagattactagcaataatcctcgagttttacgtatatgtcagccttggcgatactgagggtagagttggcattggtagataccagtagacacagatcttcagattctaaagtgaacggacggctatcttgggatcatcaagtagtaagcccacctgagtgctcggtaggctttttgcttttttgaaatgtatattttgtatttccttggccatgctctacatggcaccctacctattttctgctctcttcgactaaatgattttgattgatcccgggtgtcccgaggtctgaatcgtaattgagattgggctgggccttgcgctgcaagttcccattagacccctttgaatgactgatacctgacttgtagagatatttggaactttcaagaccatacggagtatacaactcaaggattaaatacccataacacgaaattatctatagcataaagaattcgaaagaaaagcatgtttttcttcccgtgaatcggggatcggggaagctgcctgcagccgtgtggtggaatcacattgtcgaaaagaaaagtcatagccgtcttatacgagtgatctgcaaaaaaagcaacggactctatgagtcagatctttgaatgcatcaataccagccatggagataacacaaacaacggacacctgcatatgtgatgcccagatgtagtgagagaattatacatggcagctgcactgccgatccatatgaaattgatagggaatcccaaaaaagtacacttacccgattgagagagctcaaataatgtaacagcttgcaaagagctttattccactgctatgacctcgatctttattctttattaccgatcatgggaataaaacagtagtttgcggcggcgcaaatggaaggatctatttatagagatcttccaagttctacatgttttctgtaaaatagatctaagaaaaagatcgacaaaagctatggagattcgtgtgagatcagcttacgtccagggctgctggggtccgtatgcattcaatggtagctctgcacggccgcgcaaggctggatgttatcataatctgagggattgtcggcttattccggcgtggactgcatggccattttgggacaaaagcaaagtcgaataggtcgcatggtcagtctaaattatctacagagtactctgtagcttgcggctaataataagaagaagaagaagaaaccctcgggaatgagattgggaacaatgtgagggggttgaccgcctgtgacggtctcattgcactcactacgcatgcgctacgagattgatatctcctagcttgaagtgaatccataatattcagtctatcttgagtgggaggaactggatagctcgtgttgatcgaagatgcaagtatgtgatcacagctaattcttgaatattctcgcatcccagtcacaatcatctcactcaggccgcgggaagcacccaggttgtcacagactggctcggaacattgccactccactcctggccactgttagtggacaaaagaatataaatatcgttactgaacgtgttctcaataacaacagtacgagttccatccgggttcagcgaagcaacggattgcacaccacctccattggaatatgtgtagctcccggtaccacttagcacaatggcacccggcggcatgaacttgctgaactgagccatcatgtagtatgccgggttgaaagtatatccgccgttggcaatggttaccagaccttgacaggttgcacagccgccactcgacagatgaggaccatcttgatcatttgtgccaagtgtccaggcagtgacgcccgatgcccaattctgcaaaggccccatggtgaaatcggcggcttggttccatgctgcggacgcgggagtccagcattctgtcatatattgattgacgttgggttttgtctcgtggaattgggtaaggactgtccagtctacgttgctggcataacagtgccatgcaactccgtggacatactggctagccccattgatgacagtctgaggataggatggaacatctagtgtctatgcgttagtaaatagaatcctccctcaaagatcccgtattgtcaagtacataccagtgttgtgatcatatgcccagatatcggtgctcaggccggcttgagcgagagccggtccgacataattttgaatcaactgtgcagactcatagtcaaacacatacattgtaggatatccagcttggctgttcagaggctcgttttgaatggtaatcgcatcgatgtgggcgccgagattcgcgtaagcctggatgtacttgacaaagtactgcgcaaaggcactagcatacccagtactcccagtgcctccactggtcaagtagccatcattgaggttattgttattcgtggcgccatcgatcacaccgttcagcttcatccacccgggggcactccaaggcgaaccaagagttttcaaattcgactgaagagacttcatcttagccagcatcgtagccatggcgcttccacggtcgcccaggttaaaaccggacatagatgggtctgcattattcccattatcatcataggtatacgcagggtcaccagacaggtcggaagcgccaatggtatggcgcatcaaggcgaatccagcaccggcaccggtcatcagctcattaagcagttgttcaagtgtggaactggacaaggtgttgaaggaggtaactgtggcatcggtgacggctgctccgaagcccacgattgtttgtttgtgtccgctggatgtatcgtcgacggtcagctgccaggtcgattcggagcctggactgccgctgccttgaacgggtgcggagattgacgagagcttgtaattgccatttgagtttgaacagtaggctgatgcagtggtggctcgctttccgggtgacgcctctgctagcaccgaaagcaggagcagaggaagaaaagatggaagcatgttgtatactggtccccaagagaattttagggaaagccagtctcagtctttcgagggatagaggtgggaattgatgatcatcaggtataggcatgcattgtctttatatatacctatcaaagacaatattgtccaggctgtacccgtccatttccctaaaagagcaatgcgactaatcggccgaggggaaagtacgctgaaacgcctaagaccctgaatttcgctcaatttcggcataagctgatgaagaatactacagtatcaccgactaatgcacgccacatttcaccgacgggtccccgatagcttgtattgtcttggctatctcggggaaattgctaattcgagggtagttgcttccaggttagttgcttggaatacctttccccgcattctcgacggctttttcaatgccattgtgccacggagtattgaataatgggttgcctcaacggtcatgttgcttattcggggtggggttgcccggaagcggcatgaaacaataggatggggcgttgtataagcggtgattaccggaatgagaggggcgaggtgacagccacaaggcaacttgggaagttgtaatcaaagcagaagtaagaagtagtgtaagaagtagtgtataagtcgtaggaaacacttcctttgctgtccaatacttaacaaagagcaaaggggtcaaaacgagaacatttagtacagacgtctcaattaaccaagataaatatagctctccaattttgatgctattcacaatcgtactagtcgaaataatgaggtcgatcagggaagacttggcttaggggagatcaccatccctaaaaggcagccacgtgcagggccacggctaggacgggagaaccattccatgagaacgtgcaatgaattcgaagcatctagagccacgagtggaacttgtaagtggaacttcggtgatgttgaggaatgcaggttgtgtggtgctgaaaacaggtcacgtctgcagatactccgtgttgatgacgtcaacattctgcgaacaggccactcaagtcctaatcgtatatgtaacccctcctccgaatgattttactccttcaaacttctactactagaaataacctgcataatcaatctacatcatgagcggcaataaattccccgtcgatctcaagctgttcaagcaactgaagcttgacccgaagaccgcacagctatcagcccagcaaaagagcgacttgctacacaacatcaacattttcagagatgccatcattgcctttacagcgacgggcgctgcccgtggagtttcgggccacactggaggtcccttcgatacagcaccagaagtctgcattttgcttgctttcataaacgcgaaccccagcaaatgggtcgacgctctgtatgacgaggctggccaccgtgtcgccacacaatacttgctggccgccctggacggcaagattgagcctgatcacctgctggaatatcgtgctgctggctcccaccttcccggccaccccgagctcggtctcacccccggcatcaagtttagctccggtcgtctgggccacatgtggggtatggtcaacggcattgctatggccaaccaggataaaaacgtgattctgttgggctctgatggatcccagcaagaaggaaacgatgatgaggcagcacgcattgccgtggctaaaaatctgaacgtgaagctcttcatcgataacaacgatgtcacaattgctggacacccttcggattacctcaagggctttgatgttgctgggaaccttaagggacatggcttgaaggtccttagcgcccagggcgagaatatcgacgccctatatggcgctatgtgcgaagtcatcaaccatgacggacccgccgctgttgttgtcaaccgcaagatggctcctggaattgaggaaattgagggacaatgcaaggcgcacgatgttattcccgtcgacattgctcgcaaatacctcactgggcgcggctatagccaggagcagcttgctttctatgataatatcaagcctggctcaaacccccacacgtacaagggttcgaccaaagacaagggctcgaaccgcaacattttcggcgaagccgtgaatgatattcttgacaaattgagcaaggaggaggctaagcgtcgtgtcatggttattgactccgacttggcaggctccaccggcctgaaggctatcagcgccaagcaccccgaatcctttatcgcatctggtgtcatggagcgcggcaatttctctgctgccgctggctttgggttccgcagcaatggagagagacaaggtgtcttctctaccttctctgccttcctggagatgtgcatctccgagatcaccatggctcgcctgaacgactgcaccgtcctgtcgcacttctctcacagcggtgtcgacgagatggccgacaacacctgccacttcggtctgaaccacttcttcgccgataatggtctgatggatgccgagactaccaccctgtacttccctgccgatggcgagcagatgaaggccgtagtcaatgaggtcttctggaacaagggcctgcgcttcatcttctccactcgttccaaggtcccttacatcttgaaggagggcaccgaccagaagctctttggagagggctacaagttcgttcctggcaaggaagaagtcattcgcaagggctccgctggttacatcgtctcatacggtgatatgctctaccgctcgcttgatgccgtcgagaacctgcgtgcggagggccttgacgttggtctgattaacaagccaactctcaacattgtcgatgaggagaccatcaagttgtatggctcctcgccattcgtcctggttgttgagtcgattgcgcagaagactggtctcggctctcgcctgggtacccaactccttgagcgcaatttgacccccaagtttaagtctctgggtgctaacaaggagggctgcggtggtctgtaccagcaagtcaatgctcagggccttggaccagagcatatcatcgctgcggtcaagcaggtggctggaaaataaatgtgtgaatgtctaacgtaacgactttttcatgaaataataaaaaacccttttccatttgtcttttgttcatatcttacccatttcttctccttatcacagccaagacttcagcgccaagacctcaggacccctaaatcccgcccgtcgttccaatcagatatcgcggcagttgaagcgacatttggcttcggcactttccactgcattctccataattatcctcccgccgtactgctgattggctgaactctgcatagttttgacttggcagccaggactactcccaaaaagcactagatcgcaggacttgaaaagcacgcaatcgtgctaaaagacgaagtagggctaatgcgatattaggtcttctagatcgatattgatttcttcagggtagagaaaatccatatatagcgcatttccccttttttgtttagcgcctaagttagaattttatcttcgtggcttgaatcaacgtgcttgctatcctttaagcccaaaccatataatggccgaacgaggttctatctcggcatcgtccggtacgccatttgaaaagcgagtatggtatcgcggaacactcttcaatgcctgtattatcggggccgtcggattcacagccccgggcttgtggaatgccatgaatgctttgggtgctggtggcgcgcaggagcctttcttgattaatgccgccaatgcgcttgttttcggtcttagtatgtgatatgttgctgtaatcgcattggatttgaatcgggcttctcgctaacttgatttgcttgctagtgggcattttgtgtctgttcggtggcccaattgccaaccggattggcctgagatggactctgatgcttggtgctgtgggatatccgctgtattcgtatgtatcatgagaacaaggtgtgaaattgtgttatttgaagactgactttatatacagtgccgccttatacacaaataaccgttttgtgagttcttcgtcaacttgtacaacccaggaaagaagactaattcccatgtagggaaatgtatggtttgtgctggttggatcagtattttgtggtttatcgtgagtatcctatactgatcaaagaaataatatcgttgactaacatttatagcgctggtcttttctgggcttctgagggtgctgtggcactaggttatcccgagcctgcaaagcgaggccgatgcatgaagtgagatatttcaaaaagtcctacagtgacaaaaagactgacttaaaaagcatctggctttggttccgtacaggtggccctatactgggaggtgctattgtccttggtctcaaccagtatgttaattccaatttgaattcacatcacggacataatttactgacgattggaaagtgctgccgatgcccatgcaaaaggaaaagttggatctggtaggtctattcaagctagattgaacaaaccgattgctaacacacgacagagacgtatctcatcttcgtcgccctccaatgtactgccgttcctatagccttcttcctcacgtcacctgacaaggtccaacgcaccgacggaagcaaagtcaggattatcctgcaggactcgtggcgtgatgaaatgaaagagctctggaaggtctgccagcggagagaggtatgtttaagatcattggttccatcgtgcctatgtgctatatgtgactgacattcctagattcttttgctattgcctgttttctgggccgcatacttcaatatgtataccggaagtatgtatcgtgtgtttgctcttatatgcaattgctgataacttggtccagatttcaaaacgtactactttggcgtgcgcgctcgcgcgctgattggattcgtcagtatgtttacacactcacaatatttggacacacttttgcatcagtgctaacatggaaaaaagcctacttcgccactcttcttgcatcaacgatcattagtagattcctggactaccgtggcctttctatcagaaacagaatcaagtacaggtacaaaatcacaccatccaaaattgaacttaggagcaaaattaacaagccacagctttttctacgtaattgtcgtccacatcgctgcctgggtctactgctgggttatccaagagaagtacactaggaacccaccaacacttgattgggccgacaaaggtttcgttgaaggattcttcgttatcctgctctggggtgagtcttatagattgatcaacatcccacatagcgctaacctatttcatcagaattcgctcagcaatcgctgcagaacttcctctactaccttctatccaccatgaccgacaatatctccgaactctgtaagtcgaaaattcaaaccgatcgtcctatctccagattactaataccatatagcccgcttgtccggtatcctccgtggccaagagagcttttcacaggctgtttcttacggcctcaactcgaagaaatggcatggtggaagagtgccacttatcgttaacactatccttctcggtaagtgatacacattgactggttataaagaagtagtgctaacttttatttacagttcttgcggtgtggcctacttggctcgttatcagggtccacgttcccatcgagcattccaaggagacttctgagttgccccaagcccaagacgaggagcagaacaacgttagtctctctgacaaggagacatttcatgttgccgaagcagttgcttcgaaataaaaagttggagttgttgaatgtccttgaaaaaagtacttaatctatttacgacacggggttgacgtctacacaaaagttccctcacacaaaatctattccatgaatcaatgagaagcctatacataatctgtgaataatcatctgttctttactcctctttcaaactgcgagaacaccctcaccattctggctttcctcgcgtaatttccgctctgcacggctctcactagtgggatcaagataggcttccgtataaggttagcacaagatgcagaattgaaaaccacaatctcttgacatgagtactcacgtatttcaccaaaaacggtggtccggataccttgtctagctcctttgtatgtaccagggataacccgatgaagggtacacctaagagatcgtcagttcccaagtccaaagccacaaagtgaacagtgcatagttaccgattatcccacattgcaacactgccaacagcccatttccaacgaacagagtgatcatcggccgagtggatatgatatgccaagaaatcaagaaccttgtctagaaaggcatcagccctaaaccacaaactgattcgttcagtatttcactcaccggattccactttcttaagctcagcaaatccagtcacaaatccaggattgacgttcaatgccttcagcttagtgactgggtgcgtgcgcacggctgggtggtgtgtatcgattggagggcgattgggacctgcaccccatagatcgatgatggtatcatctatttagttaatatgtaagcaggtttactactatggttatgaaggagacaaacactgcagccttgaggtatgcacggcgtgaaggccatctaggaaccttttgtacgcgttgcttagggcatcgtataagccatattgagatacctatgaaatcaacattttgtctcgaatgcggcctgtatctgtaacatacccaagctgtgtcgccaccaacttcgggatgttcttccattctcagtagggagtaggtaggtgctatgatgtgttaaagattaacagccagaaaatatggttcaccacatacgattgatctcgaatgatgtatcagcgtggaaatctccactcggctacagaagtagaaattgctgttagaattttggtttaagcattttcaagatatcttacccaaggcgtgtagcttaggatttcacggtgatcctcgcggctacctttgatattcacgaactttgtgctgggttagcaatgatgacaaaatgccatgaagtggttatggaacttcatactttttgatcctgataattgtcagctcacttgaatctgccttggaatccagaaaacttcatgttttagcttaccttttgagcagggtgtttatccaagatacctgcaagataaaattattaatccgatgccgccattcggaaatccatatggccttaccataatgctgaaacagttctacctggcgctcagtagtaagatcctgatcccgaaagaagacaactccccgctcattaacgagaagcgccaattcatccagctgagtctcattcagctgagacaattgcacatcctcgaggacagttccaatagactcagtcaagtcaaccggcttcgccacagagaatagtgccttcttctccggatctgcaaagaatgctcggtctttgggcggggtaaatggctcacggggtggttctggaggcacatgattcttgatcttctcgttgaaatgaggatggagtgtaatggggaatcccgaatcggcggaaatatgcttgcgggcttcgagattggccatattctgtgagctcagttgcaatgatgcgtgtaaacaagtaaaaggattataatctgggtgaagtggaagtagatttacttatttcgtgctttataatctgttgagctcatattcggcttggattgcgtcaaaacgctactagtcgatatgttcgagtccaatcggctatgtatttccctaatatggtgtattgttagattctatgtcgaatatgtggagagtacgcacgcaatgtagtctttataaattccgtagtggaatttccaacgttgctataataatacaggtgcatattgggatcacgtggtaccgatggagtatatgcatcaagcgaagatactctccgaacagtaattcagacggtccaatataaaagtgaccaaactgttaatgaggcatatgaagtcctaattttgatccaaaaagggataagaattgtcaatgtgtggggtggtgcaagcaagtaaacaagcaagattccaataactataagtctagttatgttttggggattgttttgggacccccccccttggttgttgggacccccctttggctgatctctgcgtgtctgatcccttaggcatcagctatttctgccatttcttttaattttctgccatacttatttctgtaagtttgaattcttgtttacatagtaaaaaatgcaccattctgctcaaaattatgattatttctttgatttggtatgctttacaggaaacaactgtttcaatctgaaccgggtgctgtaaatatcacgtggaatgatagcagtgtcggggtcagcctcatgcaattcggccatgatctgacgagtagtacgacccaatcgaagcgcagtaacaatctgctctcttttattggtaagctctcgggttcgctgtacagcgtgcgttgaagcaggagatggttggtggttatgggacgggttctcgattgtgacatgccaaagacctgttccgtggtctcgccgcagagccatagagaaggggcattctaacgccatagtattggtattgattcgcttcttcggttgaggccgatgctcacatgcatctggcctccgaccacgatcacagataagccggactgtcttctttaccccccttttggtagtcttagaccggcggatcgtaaccgcatacccatgtgggcgtgcgaagtcgttgatagcatcttttgcttcatcggaggtcgcgtatgtacgatcggtgggcggtagcgccatcgtgatcgcgcatgtcggctgtgtagagggtggaagcggctgtatgagggaatcaggctctggctgggcgctgggcgggttggattgggtgtctggattgatatcgggatcggtattggactcggaatccgagtcctcaaggtaagcaagccccaaagaggccatatcgaaaagataaatgctcaaaacgtgaagacaacgcgaaagggatcaaagatggtggagacagggccattgaacttgaaatctaggcttggctttccagccatcagctttgcgccggtaaagtacggacggagcttacttttctgctaagaagatcccggcccgaaaggggtcccctccgacttactgtaacgcgtcacgtcacgcgtgagatcaagtgccagatcatgtgccaaggcggccaggaaagcggtgagtcttgatggtaggcggtcagttgatgcctgaactaggggggtcccgacaaccaatggaggggtccccgatacaatttccttttaggtattaggacttgtagtaaaggcctactgggtcgcgtggctacaaaagcctctcatgcttttcatatcaagaaaatcgaggtctaatatgaggagctcagaatccaaatttgccagtgctcaaatatcacatattcgatggcgcaaactggagatggctatctgtctggctattcgaggaccaccacatgtccatatatagtacaacatttcactccacttccccattctcaatctccaacatcatttcctccgctttccttgctaccgttctcgcttcgtctccaatatcgcccctcatcctcgctacctccccaaatctcttccgccatagcagccacctctccttgcaaaagccatgtttgccttcccagagagggcctccccttcccggcgccatacccggatagccgctaagatcttcatcccattcatagatctctacgccgagtgtactgatccatacagcagcagaaggaatcgcctctaaggggtgagttagttacaactggcctataggtatttctagcgcgtcgcggagggtgaacattgtaaaccataagtatgcgaatacaggttcctcgattatcatcaaaaatgctatgaatttatcccagttgatgattttcaaaattgcactttgtcggtgatcagggggtccaataggtacggatagattccactgctcacggagtgcccagcctagtgtcgggaggtctttccaaatttgcatatcgtagagaatgagtgcgtccccgctggctgttttcgggcttgggagcttagaaaattggactaggatctcgacgagcttatcatggtattcagaggattcgcaggcgcatcccactatcacagcccacagacgaccaagacctgcttcaggcttcattgataaagagatcgaagcgagattcctcacggcttcttgtgcagagatgctgtcgctgaaaaggtcctataggacagcgaattgagaagtaaacatttcatctgtgacgtctgtcattttgagaaatctcaatagtaatttacagatgaatgtcgtgagtggcatacaataatagatcaaatgcaacagtaaggctagacttggtgaaaaatgagatgattaaaccaagcgtgcctcgtccgtcgtttagcgtggtattaaatgacgcacagggattattccaagtagctatcgaactagtttgctgcgccagtttatatatccactatcttgatgttcatcctcatggatacgattatcatgggggctcgactgtctgtcgactagagctatatgagcggggttgaatttgtcgtgagacagtatggttcctatcttctagaggaatataagtcgattatacgtagtccataaagtagagtcccagaactgaggtgggtatgtgggattagcccaccgactctaaaagcggtcaacatgatcgtcctaattattagtgacggaaaaacggtggtaaggcgagtgtattttgtggcagaaaaatcttaataaattctctaactctctaaaactgacaatagtcctaaaacatgacaatctgatggacaacttagtaatcaaaacaaacaaaacaannnnnnnnnnnnnnnnnnnnnnnnnnnnnnnnnnnnnnnnnnnnnnnnnnnnnnnnnnnnnnnnnnnnnnnnnnnnnnnnnnnnnnnnnnnnnnnnnnnnnnnnnnnnnnnnnnnnnnnnnnnnnnnnnnnnnnnnnnnnnnnnnnnnnnnnnnnnnnnnnnnnnnnnnnnnnnnnnnnnnnnnnnnnnnnnnnnnnnnnnnnnnnnnnnnnnnnnnnnnnnnnnnnnnnnnnnnnnnnnnnnnnnnnnnnnnnnnnnnnnnnnnnnnnnnnnnnnnnnnnnnnnnnnnnnnnnnnnnnnnnnnnnnnnnnnnnnnnnnnnnnnnnnnnnnnnnnnnnnnnnnnnnnnnnnnnnnnnnnnnnnnnnnnnnnnnnnnnnnnnnnnnnnnnnnnnnnnnnnnnnnnnnnnnnnnnnnnnnnnnnnnnnnnnnnnnnnnnnnnnnnnnnnnnnnnnnnnnnnnnnnnnnnnnnnnnnnnnnnnnnnnnnnnnnnnnnnnnnnnnnnnnnnnnnnnnnnnnnnnnnnnnnnnnnnnnnnnnnnnnnnnnnnnnnnnnnnnnnnnnnnnnnnnnnnnnnnnnnnnnnnnnnnnnnnnnnnnnnnnnnnnnnnnnnnnnnnnnnnnnnnnnnnnnnnnnnnnnnnnnnnnnnnnnnnnnnnnnnnnnnnnnnnnnnnnnnnnnnnnnnnnnnnnnnnnnnnnnnnnnnnnnnnnnnnnnnnnnnnnnnnnnnnnnnnnnnnnnnnnnnnnnnnnnnnnnnnnnnnnnnnnnnnnnnnnnnnnnnnnnnnnnnnnnnnnnnnnnnnnnnnnnnnnnnnnnnnnnnnnnnnnnnnnnnnnnnnnnnnnnnnnnnnnnnnnnnnnnnnnnnnnnnnnnnnnnnnnnnnnnnnnnnnnnnnnnnnnnnnnnnnnnnnnnnnnnnnnnnnnnnnnnnnnnnnnnnnnnnnnnnnnnnnnnnnnnnnnnnnnnnnnnnnnnnnnnnnnnnnnnnnnnnnnnnnnnnnnnnnnnnnnnnnnnnnnnnnnnnnnnnnnnnnnnnnnnnnnnnnnnnnnnnnnnnnnnnnnnnnnnnnnnnnnnnnnnnnnnnnnnnnnnnnnnnnnnnnnnnnnnnnnnnnnnnnnnnnnnnnnnnnnnnnnnnnnnnnnnnnnnnnnnnnnnnnnnnnnnnnnnnnnnnnnnnnnnnnnnnnnnnnnnnnnnnnnnnnnnnnnnnnnnnnnnnnnnnnnnnnnnnnnnnnnnnnnnnnnnnnnnnnnnnnnnnnnnnnnnnnnnnnnnnnnnnnnnnnnnnnnnnnnnnnnnnnnnnnnnnnnnnnnnnnnnnnnnnnnnnnnnnnnnnnnnnnnnnnnnnnnnnnnnnnnnnnnnnnnnnnnnnnnnnnnnnnnnnnnnnnnnnnnnnnnnnnnnnnnnnnnnnnnnnnnnnnnnnnnnnnnnnnnnnnnnnnnnnnnnnnnnnnnnnnnnnnnnnnnnnnnnnnnnnnnnnnnnnnnnnnnnnnnnnnnnnnnnnnnnnnnnnnnnnnnnnnnnnnnnnnnnnnnnnnnnnnnnnnnnnnnnnnnnnnnnnnnnnnnnnnnnnnnnnnnnnnnnnnnnnnnnnnnnnnnnnnnnnnnnnnnnnnnnnnnnnnnnnnnnnnnnnnnnnnnnnnnnnnnnnnnnnnnnnnnnnnnnnnnnnnnnnnnnnnnnnnnnnnnnnnnnnnnnnnnnnnnnnnnnnnnnnnnnnnnnnnnnnnnnnnnnnnnnnnnnnnnnnnnnnnnnnnnnnnnnnnnnnnnnnnnnnnnnnnnnnnnnnnnnnnnnnnnnnnnnnnnnnnnnnnnnnnnnnnnnnnnnnnnnnnnnnnnnnnnnnnnnnnnnnnnnnnnnnnnnnnnnnnnnnnnnnnnnnnnnnnnnnnnnnnnnnnnnnnnnnnnnnnnnnnnnnnnnnnnnnnnnnnnnnnnnnnnnnnnnnnnnnnnnnnnnnnnnnnnnnnnnnnnnnnnnnnnnnnnnnnnnnnnnnnnnnnnnnnnnnnnnnnnnnnnnnnnnnnnnnnnnnnnnnnnnnnnnnnnnnnnnnnnnnnnnnnnnnnnnnnnnnnnnnnnnnnnnnnnnnnnnnnnnnnnnnnnnnnnnnnnnnnnnnnnnnnnnnnnnnnnnnnnnnnnnnnnnnnnnnnnnnnnnnnnnnnnnnnnnnnnnnnnnnnnnnnnnnnnnnnnnnnnnnnnnnnnnnnnnnnnnnnnnnnnnnnnnnnnnnnnnnnnnnnnnnnnnnnnnnnnnnnnnnnnnnnnnnnnnnnnnnnnnnnnnnnnnnnnnnnnnnnnnnnnnnnnnnnnnnnnnnnnnnnnnnnnnnnnnnnnnnnnnnnnnnnnnnnnnnnnnnnnnnnnnnnnnnnnnnnnnnnnnnnnnnnnnnnnnnnnnnnnnnnnnnnnnnnnnnnnnnnnnnnnnnnnnnnnnnnnnnnnnnnnnnnnnnnnnnnnnnnnnnnnnnnnnnnnnnnnnnnnnnnnnnnnnnnnnnnnnnnnnnnnnnnnnnnnnnnnnnnnnnnnnnnnnnnnnnnnnnnnnnnnnnnnnnnnnnnnnnnnnnnnnnnnnnnnnnnnnnnnnnnnnnnnnnnnnnnnnnnnnnnnnnnnnnnnnnnnnnnnnnnnnnnnnnnnnnnnnnnnnnnnnnnnnnnnnnnnnnnnnnnnnnnnnnnnnnnnnnnnnnnnnnnnnnnnnnnnnnnnnnnnnnnnnnnnnnnnnnnnnnnnnnnnnnnnnnnnnnnnnnnnnnnnnnnnnnnnnnnnnnnnnnnnnnnnnnnnnnnnnnnnnnnnnnnnnnnnnnnnnnnnnnnnnnnnnnnnnnnnnnnnnnnnnnnnnnnnnnnnnnnnnnnnnnnnnnnnnnnnnnnnnnnnnnnnnnnnnnnnnnnnnnnnnnnnnnnnnnnnnnnnnnnnnnnnnnnnnnnnnnnnnnnnnnnnnnnnnnnnnnnnnnnnnnnnnnnnnnnnnnnnnnnnnnnnnnnnnnnnnnnnnnnnnnnnnnnnnnnnnnnnnnnnnnnnnnnnnnnnnnnnnnnnnnnnnnnnnnnnnnnnnnnnnnnnnnnnnnnnnnnnnnnnnnnnnnnnnnnnnnnnnnnnnnnnnnnnnnnnnnnnnnnnnnnnnnnnnnnnnnnnnnnnnnnnnnnnnnnnnnnnnnnnnnnnnnnnnnnnnnnnnnnnnnnnnnnnnnnnnnnnnnnnnnnnnnnnnnnnnnnnnnnnnnnnnnnnnnnnnnnnnnnnnnnnnnnnnnnnnnnnnnnnnnnnnnnnnnnnnnnnnnnnnnnnnnnnnnnnnnnnnnnnnnnnnnnnnnnnnnnnnnnnnnnnnnnnnnnnnnnnnnnnnnnnnnnnnnnnnnnnnnnnnnnnnnnnnnnnnnnnnnnnnnnnnnnnnnnnnnnnnnnnnnnnnnnnnnnnnnnnnnnnnnnnnnnnnnnnnnnnnnnnnnnnnnnnnnnnnnnnnnnnnnnnnnnnnnnnnnnnnnnnnnnnnnnnnnnnnnnnnnnnnnnnnnnnnnnnnnnnnnnnnnnnnnnnnnnnnnnnnnnnnnnnnnnnnnnnnnnnnnnnnnnnnnnnnnnnnnnnnnnnnnnnnnnnnnnnnnnnnnnnnnnnnnnnnnnnnnnnnnnnnnnnnnnnnnnnnnnnnnnnnnnnnnnnnnnnnnnnnnnnnnnnnnnnnnnnnnnnnnnnnnnnnnnnnnnnnnnnnnnnnnnnnnnnnnnnnnnnnnnnnnnnnnnnnnnnnnnnnnnnnnnnnnnnnnnnnnnnnnnnnnnnnnnnnnnnnnnnnnnnnnnnnnnnnnnnnnnnnnnnnnnnnnnnnnnnnnnnnnnnnnnnnnnnnnnnnnnnnnnnnnnnnnnnnnnnnnnnnnnnnnnnnnnnnnnnnnnnnnnnnnnnnnnnnnnnnnnnnnnnnnnnnnnnnnnnnnnnnnnnnnnnnnnnnnnnnnnnnnnnnnnnnnnnnnnnnnnnnnnnnnnnnnnnnnnnnnnnnnnnnnnnnnnnnnnnnnnnnnnnnnnnnnnnnnnnnnnnnnnnnnnnnnnnnnnnnnnnnnnnnnnnnnnnnnnnnnnnnnnnnnnnnnnnnnnnnnnnnnnnnnnnnnnnnnnnnnnnnnnnnnnnnnnnnnnnnnnnnnnnnnnnnnnnnnnnnnnnnnnnnnnnnnnnnnnnnnnnnnnnnnnnnnnnnnnnnnnnnnnnnnnnnnnnnnnnnnnnnnnnnnnnnnnnnnnnnnnnnnnnnnnnnnnnnnnnnnnnnnnnnnnnnnnnnnnnnnnnnnnnnnnnnnnnnnnnnnnnnnnnnnnnnnnnnnnnnnnnnnnnnnnnnnnnnnnnnnnnnnnnnnnnnnnnnnnnnnnnnnnnnnnnnnnnnnnnnnnnnnnnnnnnnnnnnnnnnnnnnnnnnnnnnnnnnnnnnnnnnnnnnnnnnnnnnnnnnnnnnnnnnnnnnnnnnnnnnnnnnnnnnnnnnnnnnnnnnnnnnnnnnnnnnnnnnnnnnnnnnnnnnnnnnnnnnnnnnnnnnnnnnnnnnnnnnnnnnnnnnnnnnnnnnnnnnnnnnnnnnnnnnnnnnnnnnnnnnnnnnnnnnnnnnnnnnnnnnnnnnnnnnnnnnnnnnnnnnnnnnnnnnnnnnnnnnnnnnnnnnnnnnnnnnnnnnnnnnnnnnnnnnnnnnnnnnnnnnnnnnnnnnnnnnnnnnnnnnnnnnnnnnnnnnnnnnnnnnnnnnnnnnnnnnnnnnnnnnnnnnnnnnnnnnnnnnnnnnnnnnnnnnnnnnnnnnnnnnnnnnnnnnnnnnnnnnnnnnnnnnnnnnnnnnnnnnnnnnnnnnnnnnnnnnnnnnnnnnnnnnnnnnnnnnnnnnnnnnnnnnnnnnnnnnnnnnnnnnnnnnnnnnnnnnnnnnnnnnnnnnnnnnnnnnnnnnnnnnnnnnnnnnnnnnnnnnnnnnnnnnnnnnnnnnnnnnnnnnnnnnnnnnnnnnnnnnnnnnnnnnnnnnnnnnnnnnnnnnnnnnnnnnnnnnnnnnnnnnnnnnnnnnnnnnnnnnnnnnnnnnnnnnnnnnnnnnnnnnnnnnnnnnnnnnnnnnnnnnnnnnnnnnnnnnnnnnnnnnnnnnnnnnnnnnnnnnnnnnnnnnnnnnnnnnnnnnnnnnnnnnnnnnnnnnnnnnnnnnnnnnnnnnnnnnnnnnnnnnnnnnnnnnnnnnnnnnnnnnnnnnnnnnnnnnnnnnnnnnnnnnnnnnnnnnnnnnnnnnnnnnnnnnnnnnnnnnnnnnnnnnnnnnnnnnnnnnnnnnnnnnnnnnnnnnnnnnnnnnnnnnnnnnnnnnnnnnnnnnnnnnnnnnnnnnnnnnnnnnnnnnnnnnnnnnnnnnnnnnnnnnnnnnnnnnnnnnnnnnnnnnnnnnnnnnnnnnnnnnnnnnnnnnnnnnnnnnnnnnnnnnnnnnnnnnnnnnnnnnnnnnnnnnnnnnnnnnnnnnnnnnnnnnnnnnnnnnnnnnnnnnnnnnnnnnnnnnnnnnnnnnnnnnnnnnnnnnnnnnnnnnnnnnnnnnnnnnnnnnnnnnnnnnnnnnnnnnnnnnnnnnnnnnnnnnnnnnnnnnnnnnnnnnnnnnnnnnnnnnnnnnnnnnnnnnnnnnnnnnnnnnnnnnnnnnnnnnnnnnnnnnnnnnnnnnnnnnnnnnnnnnnnnnnnnnnnnnnnnnnnnnnnnnnnnnnnnnnnnnnnnnnnnnnnnnnnnnnnnnnnnnnnnnnnnnnnnnnnnnnnnnnnnnnnnnnnnnnnnnnnnnnnnnnnnnnnnnnnnnnnnnnnnnnnnnnnnnnnnnnnnnnnagtcacgtgatccaactgtatcagggatgaaaaatgacagtattcatcctagattctgacaattagtctattgtaggcctgccctctgtggagtttatccaaaaccacgcacaattgtacgttataattatcgtctcttagtaaggctgattaccaaacactatgagtactaggtacacagtcgttagatgtattcctgagaagagatctaaattgatgcatcggacataatcttgcttcaacagttatgagatgcaaactccaaattcgagccgtcatgacttggcatgggtatcatcagaagtatcgtcgttctttcctttgacagagagccactccagccccaatacaccgagaataccaaagcaagagagggcgacgctcacgtagaatgtctgatctagggccttgttgtaagcaagcaggacaacatcgtagagctccttaggcacttggctcttgaatttcgttgcgccggctgcaataatttcagtggcatcaacatccggagcatattgcgccatatttgttttcagctgatttgtgaacacattctgcgcaacggagacgaagaccgcactggtgagattctccgtgaatataacaacagcggtgccgatggggatatcctccaatgatagcgcagtttggggtgcggagaatgctgtctgtaaaccacacccaactcccgctccaagaatcacttgatatccaatccattctgcgtggccggagttgacgtctagcatggtgagcagaccggctccgattgccatgaaagccaccgcaatataggcccattgtacgtagtacccaaacaccgaagtaagaccgcccgtcacgaacgagaagagcacgtagctcagtacaagaggaagactcatgacaccggacttgattggggtggctcccttgatggcttggaaccaaatttgaatctgacgaacaagttagtatgctgtaatttagggtttatccaaccccacaaggagctatacacacgtaatagagtatgacgaaaaacgcagcgacgatgcatgagccgaacaaagatgagccccaaatattgcggttgtagaaaatcctcttggggacggttgcaagttcaccggaccgaagctgaacaaacccaaatgcgaccaaaatcacgaaggccactacaaacagagcaatgattcgcccgctggcccatgggtatttggtaccaccccattgcagggcaaggagcaaacaaatgataccaggaagtaaacagagggtaccgggaatatccatctgcctcagttgattgatgaagccgagtttacctgccttacttcctttgaaagaagaaacgaagaataaaatgaccagaccagcaacaaacccaagaggaaggttaatgtagaaacaccacctccaagtgagtttggcgttattggtgaaggcaccccctatcaaaggaccagcaatggcagaaaatccgtacatagcaccaagggccccaatcaacataggacgttggcgtggcggcaccgagtaggcgatcaataaaaacgaaccgtttgagacaccaccaccaccgattccggcaatagcacgccccacaatcagagcagtggatgtaggtgcaacaccacagatcaaagagcccagttcaaaaataaacagggaggccaagtagacccatttgacggtgtagaatgtgaaaagctttccccacatcagctggaatgaacatactgtgagcatgaaggcactcgcgtaccacccaacatcttctaatgcgttgaaatcatcggtgattttagggatggcgctggaaataattgtgttgtctagccccacaaggaacatgcagaggctcaagctgagagcgatgaggatgagcttggcctttccggggtactgaggttcgttctggttgctgagaggcccagaatcatcggttgacgttggtgtacgtttttcagtctgttgtatttgcagaggatctagaggatctgctgtagatggcggattggtgggtttgtcatgggggagcttcatggttggagaagaggtagaaatatacaaagacctgaaaagtgaacagatttgccggctttctcagatcgtcgcatattgaacaaggatatgaaaaggatattagacttttatattgaagcttccacgggttcctctagatccgtaaggggaatagtggatcacgccgaggcatgagtcatgttcactcattgtgacctcctggtgatcaaggcgctttggggaatgcatttggatagtttgttaatccctaataattgcaaaggcaatgtcagaattgggaaagcctggtagccgtcttaccatcccaccctgacattgatacctggaacaggtatgggggcggtaagacggctagtacctaacccagtgagacaatgttatgcagcaaacccatccaatacggtaggcggtcggcttctgccgaaaagtgaggttatatcggactttaaggatgctatttcgcccttcggggcatatggtcaaatgaaaatatacagagaagattagcatggcccctgcactaaggatgacacgctcaatcaaagagaagctacctatttttttctcttttacacgtcttttattaagcttatagggtggaggccttttttgcaatatatgattggtcctacgcaattgagaagtcacgtgtaaagccccatagccccacgtcgcaggtacgaaaccgaccaacggcgattgctgaatttattcccttccaacttcacagatctcattatcacgatgttaaagcaaacttcactttcagcctgtaggtgatatttccagtcgaacatagctgtaaatagagaaatgcaattctactaaacggtccgatctcgggaggtccacggactacggccggacccactcttccccgcggaatttcccacgactgatcttccaacagaaggccgaataagggtggattgaaggttgatgaagcgcattaaacgaggcaactagctggtaagagccaggcttcaagcaattgctccgtattatcctacgtttaggacaaaactcgacttcgccacacatctcaggctcagccgaggggaacttgccgcgggatttccctccacccgaaaagcattgacaaacaagatggaaagcggggacgagcgaccataccggtctcacacgaagccagcatgcgtaccgtgccggcggaggaaatcgcgatgcaaattggagccccacaccgcggcctgtctgatgtgtcgtgcacacggcacagagtgtacatttcccaacggcagaggaaagtcaacaccgcaaaagaggtattctacagaggatagcccaatacaaccgcacccgactttacgaactccagccgtagctgcccggccactgaaccggttaccgccaccagtagcgacttcgccgcagttctcgattgtcacacaggctcagaacgaacaggatacaccgctgtctcttgaagccgacgatgataatccccatatcctcggtccggcggtgactggggataatcatgtcttggctgactacctgtctaacatttcgggtggccaggggattcgtgagattcgtccagtcgagccgggtagttcctcatccccggttatattcaccaaggtgcagaaaaggccgttggggctcatggtgaactccagtccggcattgcataagttacaaaccatcgaaaagcttgtagagccatggggaccacacttgatagacatgtgagttagatgatgttggttagtattcgcgagaagtttggaaactaattgtccccagatatctgagaaagatcaatccctgcatcccactactcgaagaaagttcctttcgggcgcaatacacaaatgccagacatcgcatttctcctgcgcttttggcgtgcctgtatgcccacgtgcttacccaatggcaacatgacccccttttgtcacgagaaagatgtccagacattcgttttgtctggaatcttgctattgaagcgtcctattcggagttgcatgcctcagctggaatatcaacgataaaggccatcctcctcgatgttgggggtcgtccaaccacatctatgacaggcaacggagtaaggcttggttcggctgttgcgttgtgccattccctgggtttaaatcgaaacccccttccgtgggatatcccacaggaggagaagcacatgagaatgaagatctggtggtctatattactccatgatcgctggtatgttttcaagaacgaacctttcaaacagtgcaatatttcaggaactcatcatcaaacaggtcaagtctggcgtatggaacacctccccatatcaggagatcacaatacgatgtaccactaccaaaatctgagtacctgtcagattgggaacgagaccatgaagcaaacgcggttttcatcgagcttatgaatttgaccgatgtgctagatcactgtctggagcaggtgtatagcatccgaatagagacccaagcaccaagcaggaatctagaactagagttgaacaaatgggtggactcactcacaggagacatccgcaaaatcatcatccgtggctcaaacctaaatatacccggatcctctaatctccgtctggcatacctcgcaacaaggctcctcctccggcgcattgacctagatcgagagcggcaagcaccagactcgaatgcagagcacatggccaaccaaatcatggaagcgcgcaggacggcggaggacattgtggttctggtccaggaactcggagaagcccagctgggtgacttctggttacctgtcgtagcatttacattttcagcaacggtgacgtttttgattcggtgcgcactagagacagagcaggcagcgggtcttgcacagagtggttctctgcgaatggcgaatgaccttttggattcgttacgatcgcaccacaagaactttgggtgggatctaggtgatatttgtctcgcacagcattctgatgtcattgacaagctgttgaagtcagagccaccgcttgagaactcgggggagacaaatcttgatctccgtcagccttttatgcctgatatgactttcgttgatgatatgtttccaagtacttgggatatattgcagattatggagtgaatctaataaaaatatttgaacaacagctgcatattatattgagacccgcccaggaaaggttcagacagggaggcaatacggtctttatcgaccaagacgttcagaagagatcctgcagtagaatatgccgtgttcacgcgaggtagattcgacttcctgccaaccgggtgcgcgtgtattgatatcgagggggagacatcgtttggctgtgtcattgtggttatgggtgttgtgagtttcaagtcgataaggccgtgcctgaatccgctgtggcatagtggcagctcgagttgcgcagttgggcctcaacatcacggtatgtgcatttggcgtttggcacaattatagagtggtgtgctaattgaccccccaaaaagcggatttggaactctggcgtaaacaggagtcggaattcctgcgtcactgcagtctgcagcggtcatgtattgattgatatacgagcgaacttacatcatctgtgaatcactattgagcattctcgcttcgaccatcttatcagtagaccctcctaaatacggtctttataatctttggagtgtgatagtaacatgtgcctgcgagtcctctggataccatgataagattgtcgagctcctagtccaactctccaagctccccagcgaggatatactcattctctacgatatgcaaatttggaaagacctcccgacactaggctgggcactccgtgatcaccgacaaagtgtaatttcgaaaattatcaaccgggataaattcacagcacttttgatggcaaccgaagaacctgtattcgtatacttatggtttacaatgttcaccctccgcgacgcgctagaaatacctataggccagttattactaactcaccccttagaggcgattccttctgctgcgatatggatcagtactctcggcgtagggatctataaataggatacagatcttagcggctatccgggtatagcgccggggagaggaggccctctctggaaaggcaaacatggctttttcaaggagaggtggcagctatggcggaagagatttggggaggtcgctaggatgggcgagattggagacgaagcaagaaaggcagcaagggaagcagagcaaatgatgttggagattgagaacggggaaatagagtaacaaattgaatgtatagacataaaactgaccatatggacttcgagcttgaagtaaaagacatcattgtaagttcgaactgaaagataattactcatctggtgtccaggtctctgtataatatccttatcaaattgcacctattgcgaggaaccaggtcgatcttgatagaaaaaagagtgcactcaactaaatgactaacatggagaaagaaagaagaagcaagttgtaaagtggaagcagctagttgatatagctgaccatgcaaacgttgcaaacaaccaaccttctcgcttacctatctaacaaacaatctatggcgagcaagcaaatatgaagcatatgataatgacctatcttagatcgggacactagtaggagatttgccaagctaggatttgcatggtaagataaaccaaacccgaatgcatatagtggtactattgaatcttcctaaataaatctagcacgtaatagcgagctaaatggcgaaaagaaaaagcttggcaggtggaggtggcgacgtagatgtgccaagttgggttgactaaaacattcaacaccatgccatttcgcgcaatgatggttgttttgttattatcacgtcatgtacttgaggtcttgggaaaatattggtttcccccatggcagagaacttttagctgcaggtagttacatgctttttcccgatacactctcttcttttttctctttgtgtccaccaaaccacagaaatcctgcacatcagagattcaggcgattcgctcggacggacgactaagcgtcgggttgaaggagctacctcgaaaggattatgatccactaatcagagggttagaacggatcaggaacagattccgatgtgtcgcgatctgcgggatcataggccgatatacatgacccttcggatttcaagattggtccgacggaaccggcccggcctgctccacatggttccgcacgggcccttgcttagagttttgtgtctggcaaagatatacgattgatcttgctctttcacatcctctgtttgcttatcccttgtccaaccattgctactggagaaagtgaccgtaacctagagattatgataggaagtgtgtgactcggagtcttcgcaattgctaactatgagtggtctcgtattactcaaccccatttctagagccaagaaagagcgagataaatctaaattatggcgtgataacatttccaagtaccctcgaaacgatatataactactcattcagctcattcattccttcatgataagtgtctatttattcaaagacccaagtcgacggtgcacgcctctttccattgccaccaagaaacaagctacacgcacatatggatttggcctccaaggctgaggctacggccacggagagtctttcatctaataacgagagagccctcgagagcaaatatgccgatgaaactctgcgcattcttgagcttcatggagactctgttgggccattgacgcccgagaaggagaaaaagctgagacacaaattgtactggaatatcttcggactactctccgctatcaacctactgctatttgtgagctcattatacgatcatcttgttcacagcctctaacttctctagatagataaatccactctgggctacgccgctattctcggcctgttcgaagagactggtatcacgaaggctgaatacaacaatcttgggactttcttctacgtcggtacgtgacattattgtttctctcattgtaccttctctaacattcccataggttacattgttgcgcaatggccgggacattatgctatgcaaaaactaccatttggaaaatttgtcgctgctcttgtcttcatgtggggtgtcatcctactacttcattgcgttgccacaacgtattccgctcttgtggtcctccgactagcactcggtgccgctgagtctgtcgttgtacctgcaatggaagtcacaattggaatgttcttcaatcgttacgaacagtcgttcctccaaccctttctttggttgacgtcggcagccgcccccatatgtgccgcatttatctcctacgggttactttggagtcatagcgccgtcctgccatggaagctgttcatgattattactggggctgtctcggtacttctttcaattgttgtttggtttcattatccaaataatccagccgatgctaaattcctgtcactggaggaaaagattcacaccatcagacgggtacacgagtcaagtcaaagttctattgaacagaagcagttcaagaagagtcagtttatagagacgctccgcgaccctgtctcatggctattcgctctgcaggcctttaccctgatgatgtctaataatctcacctacgggcagcagaacctcattaccaaggctcttggggtggacagcctgggttcgacgctcgtggctgcagctggtggcggtttcggtgtcctggtctgtctcgcaggagcatatgccctgcgatggtggccttcaaatcttgccttccacggactcttctggtgtcttcctgcaattgcaggtggagttggaatggtcgcaattgactgggaccagaagttagggatgcttgcttgtctgctcttggctggccatacctatggtaatacctacattatcgcgttgggttggactacatcatcggcagccggctacacgaagaagctgacccgaaatgttatgttcatggctggttattccattgcaaacatttgctcgccacaaatatgggttcctaaagacgcacctcggtattatggtgcctggatctccatgatagtggtcagttgggtgggcacaccgttgatccttttcattatacggttcattttgaaacgcaggaacactcaacggaaggcttgggctgcatccttgaccagtgaagagagaaaggctcacgagttgggagtcgtcgaggagcttgatgaaaatgggaatacgatacgcaggcaagttgaaattgccatgttggatatgactgatatggagaacccgttcttcatctatcctatctaaacgacacgccattggaaattccgtcaccatatctctagagaaattatcggctagggaaaatatacatactatcgtcgctctgacaatgtcgaagtacacacttcgccggataacatattattccaagcagatcggttgcgagggtctgtaatttatgtaatacccggacctataaattactatgcgttgttagtttactactttcagtttagcacctcaagacctcgttctgtaaggtccgccttctgttgctccggcataaaaagctcgccctgcccttggtataatgctaaagagatcagcaccgaacgcggggaacgctgaaatgtaagagcatgaaagaggttttgtttgctacaatcttcgacatgggttgtctgagatgatagtattcactagacgggtagaatgccctccttctcctagacacgctcctttatccgggagacctatatatagccgtatgaatcagtatacgctcattcgtagaaaagttggcatattggaggtattgcgtgttatttctccatggtcgaaagtacttaggggtacaaggtggggcggatgcaacacagacagataagaaccagggcctccagcaagcttggcctaattacgcagctcgcttgttgaccgttaacgcggggttgtctgaccttcctccccctcttcgcagtcggtcacgaccagctcaacggacactagcttggcgctttccgttacatcaaaatgtcagaaacacttattctacgtacgtcgcacaactcatcttccaacaaatcaacgattctcctcgttcatggcggattctgtggccaggagtaggacgctgtatggccgcttctcgtcgcctaccacgtgctaattcccgacctccctgcccacgggcgatcgcttgagactagacctctggaaatcaacgacgccgctcgccgtcttgcaagtctgatcgaggctaaagcgcagaagcgaatagctcatatagtcgccattagcattggcgcacatgtcgccgctactatggctctgcgtcctgtttcctttcctttcctctctatacttattgtttcgttagacaacgcatttcttctattagaaagaatctggcatataacaactttcatctccctggggtttcatcatctaattgcggtcagatcggatgagagtgtctaggcacgcaggggcgtagtgcgtacctagaccacgaaaataatcaagacgataggaaagggggtgaatcttagacaatatttcaatgaaccaatcataggcgtagatacagccaaattccaggcattaaggcctcaatatggtggaaatgatccttcgcactatgccccttcgtacctagcgtctagtgccgtaatttctcctactagtcagtataacgaaagataaactagcaagtacagcggtcactgtcaacgctgcttgtcgcgattcagtcgctcaagacacaatcgcctttttcagtagcgccccactcactttagataccaatgtcaccgattctgtagcctgtgcgtcaaaatgcgagactctcaacggctgcgaatcctggcttttcaacaccggtggctggtatgacctgttccgcaattccgccgtggccactgcttcgagcccgcactttgtctttggggggtgcgcgaaagacagtcctcgttcgtctgttgttgtttcaagcattgcttctgctacacctgtaagtggctctgtgcaaacatattcttagagaaaagcaagcgggaaagggaaagtccctgtagccgtacataaacacaatagtatcagcactgactaatggtcttttcttcggtatcctagatcgttgcgaatctgcatggaaaaagacatctcgaagctcacaagaagcatgggcattcattccacagccactagtagggcaagtaaaggcacggagcttctggtgacctgcatatcgcaccagcgcttgctttggtcacctcgcgggaaaaaaaaggagagggtttgtttggtggcctcaggcgctctatgtagggtcagatagttccaatacaacttcctcctttgcttctagattttttactctgtagtccccgagaagcattcatatcaatttaacataaaaagagaaaatggtggaattttcgctgttgctgttgctttggcttatcctaagattatcaatttgaacctagcgtagaaactgaagcaatatatatcgagtgatgggacaaccgaaaattactgctggaaatcgaatatacatctccaaacgacaaatgtgagcctctgccttttgatctaacaaagctggagttaaacagatggctgcctataaatgtagaccgatctcaaaatggaataggctatatcgaggtcgcagggccagtcggcaattccttttacagagaggctctgcagaattgtgcagcagagatgagtagagtctagaccgtgccatctcccatcattactcgcatggggctgagtatagtgtgaacatatagaaaaacgtgacctacgtaagtttatgtacaaatcccacttttgtgcagccggaataggaaatacttggcaaaattagactacatatagaagtgataggatcaggatatgtgaccagtttttatttttttttttcatttggtcatatgcgagttgccaaagtccagccacgaggaagcgattagttgctgaggccactatggtggctaaacttcctatgaagttataaaaatgataactagcctctggaagtaactacatatatgcaattaatagcgatgtactgccgtttgatatcaggcagatatagcgaataataaagtggattttagattgctgtttgtatgggttcatcttggacggtgatatatactttccccggatagaataataatgtaagagcgttgtgtgctttcgatccgattcttatggcttcccatttgcaaacaagcttatattcgaatgatgcttaagtgcggttaagaaaatgtgccgcaatttcctcgcaagtcagcttcattgcttaatccacaagtcggggcgacccttacaacccgcccggtcccacaaggttatgaggagaagagacacataagatcgaggaactcctgtcgggcacgaacctcccgaaaaacaagagatttaaaccttttcgggggtcaatgttgcctgtccaatgatacctcgggcggtggcggttgcagaatacgaagtgcgcatttttaagattggctagtgctttgtgagcaatcagacagatgagtggcgttgttgtcgcctaacatatcgtcttagagcgggcatatctccgaaggagatgggtaccttgcataaacagggaaataaaagggaaagaaaagtcaaatgtaacgtgggagttttgggggccgtgggttggaacgtgtaagtaatgtttcgtaccctggccagagttacatcacaacttgagttcgctagggcgtcaaactaacagaactaaaagacgaagtgagacagcaatcttaaatgctgcaaccgaatcaacggtgatccggcttcatcccggatcgacgcatatgattggcgtgcctgatagggaggtggctccatattctggcccccaagggtttagcgcagggtaattaacttttaactccgtcggttctgatcgccttgcttggttttgggaaagttgcgagatgatttgacctcacaccctctgcttctactcttaccctcacttacgctcttactcttcgaaagatgcaaacactcgcttgtcaaacgaatgtaaacggatcttcttacctccactttcccgccttcctgcatctccatgtggtccgactttcgggtagtgccctgcatcccactacgtacaatcgccagtggaccccgaggcgtccgtgccctggtgcctaacttacggatgtgattggattttatatatcaaactaacagtcttggcaccagtcatgaccctcatgctagtgacgctagagtccgttagggtctgttagcctctttcatgcggctcttgcaatttcatttcgccgggataaccccgaataggcatagggtttgcacatacccctctccaacgaaggcctaccatggctgatggctgatctagtttttgtttggaatgcgactctcttacgccactggctatgtggccatgttatgccacgggtttggcttgtgaccagccggtccatgccgcgttcacgtcaagttggcatgcattctgcgtatcctgttagcctttgggtctagtgttcacactatcaagcattgtttccactcgacgagtctgtgttgggtgaccctgcgccggtggggtgcctccggtgaggcactgacctatgaatcgtggaatcatccggatatcacgcacttgctcatttccacgttttggtagctctgttctcttttctgattagtgcgctcaatgtcggaggtcggcatcttccccagggggcggacatggacagtccccagcaggcgctcgttatatttcagtttcttttccccagcggacattctctttcgaccgtcaacactctcatttcgagctctttgggatacttcccaagcagatatttgtctgcgtcccctcgttgtccgcgagataacctgccattcattttcgggttattaagcggtttctgttgcatataatcattgcatataatcattacattcattttagccatgatgttcaagtcttttgccgccgtgtcggccttgtcactctttgcatcgtctgctgttgctctcgatgccagtctgaagaataatgttgctgtctactatggacaaggtttcaaccaaccccggctctcacatttctgtgaacagaccacgtcggacattatcaacattggctttatcgatcagttccccaaatttgtgggtgacttccctggttccaattttgccaatcagtgtgatggcaactttttccccggtacagagctgcttaatggctgccaccagatctggcaagatatccctatttgcaaagctgctggcaagacaatcctgttgtccatcggtggtggtaccgctacagcccagtctcttccggatgaggccactgcgacctggtttgcggatttcctgtggtattcattcggtccttacaatccatccatctcttcattgggttggaccgaggacttggttggcatcttccctcgcccattcctcacttcctcggttgatggattcgactttgatatcgagtacaacggcggagttggtatgtttccctgaccctctaccttctgactatactttccctaacactcatataggatacgccacactaattaatcgtctacgctcgcatttcgaaaccagcggagagacctactacatctccggagctccccagtgccccattcccgaccctcagctcggcgatgctattaccaactcgtactttgatttcatctgggttcagtggtacaacacccagggttgctctgctgcggattgggtgcacaagaccggcaagttcaacttcgacgactgggtcggtgtcattgagaagagtgtcaatcccaatgctaagctcttcatcggactgcccgcatcggaggatgccgctaatgctggattctacttgacccctgatgaggtgcagccccttgtcgagacttacatggacaagcaccctgatcacttcggtggtatcatgctgtgggaggccaccgctggtgagaataatctcatcaacggaacaacattcactgagcacattaaggatatcctgtacggttgcgctcctcctcctcctcccccgacttcgactgtcacccccatcccttcctcgactgtgactcctgtttcgtcgtccactgtcccgccgtctagctcggctacgccttcggtcacctcggttgcttccagctcagtcgcttcttccagctcggttgtgtcttctagctcagttgtgtcttccacctccgccgcctcttctagctcagttgcgtcttccacgtcggttgcctcatctagctccgctaccccttcggccacctcagttgcttccagctcagtcgcttcttccagctcagtcgcttcttccagctcggttgcctcatctagctcagttgcatcttccacatcggttgtgtcttccacatcggttgcctcatctagctcagttgcttccagctcagttgcttcttccagttcagttgcttccagctcagttgcatcttccagttcggttgcatcttccacatcggttgcctcatctagctcagttgcatcttccacatcggttgtgtcttccacatcggttgcctcatctagctcagttgcttccagctcagttgcttcttccagttcagttgcttccagctcagttgcatcttccagttcggttgcatcttccacatcggttgcctcatctagctcagttgcatcttccacatcggttgtgtcttccacatcggttgcctcatctagctcagttgcttccagctcagttgcttcttccagttcagttgcttccagctcagttgcatcttccagttcggttgcatcttccacatcggttgcctcatctagctcagttgcatcttccacatcggttgtgtcttccacatcggttgcctcatctagctccgctaccccttcggccacctcagttgcttccagctcagtcgcttcttccagctcagttgcatcttccagttcggttgcatcttccacatcggttgcgtcttccagctcagttgcttccagctcagtcgcttcttccagctcagttgcttcttccagttcggtcgcttcttccagctcggtgtcttccaccacccctgctacctctgagcagtcttcctccacttcgagcctccctagcagctctgtgacgactactcctgcttcatccggacatcccgccccccactcctccgccaccggaaagccccacagctcgcatgctggccatggccatggacatggacatggccaccacacccacacccacccccatccccacactgtcccaagctccactcccctgatcccgggacacccttcaagcaccgctcccatctcttctgcgaccgagtctagcgcctcttccactagcgaaggtgtcatcccgaccggtgtatcatctaccagcgacgagaccactgggagctccaagcctaccagcattgagactaccggtgcttccaagcctaccggtgacaacactaccggtggttctagctctactggcgtcgagaccactgggagctccaagcctaccagcattgagactaccggtgcttccaagcctaccggtgacaacactaccggtggttctagctctactggcgtcgagactactgggggctccaagcctaccggtgacaacactactggtggttctagctctactagcgtcgagactaccggaggctccaagcctactggcaacaacttcactggaggatccaagcctaccggtactgactcaaccacagccccggctggtatcaccgccactgcctctgtgactgcctcgccttcctccttggctcccggtacgaccacaactatcatcgtgacctcgtacgttgatatttgcccaactggattcactaccatcaccaccactattaccaaaacctactgtcctggtgatgtctccgctaccgctaccccaactggcaccgcggagatcactgctcctacttctgggcctgccacttccactccttacattcccgaaggctggaccactactgtgactgtttgcacccagtgtgccgctaccccgactaccgttaccctcactaagcccgctgctactactaccactgaggttgtgtcgcagcccaccgccccttcggtgcctgaggaatacactaccaccgtgactttctgcaagcactgtggtcctactggtagcaccgtcaccattaccatcccggctcctactgttactgctactgccaccgcaactgccaccgcaactgctactagcattgttcctggctctggctctggctctggctctggctctggctctggctctggctctggctctggctctggctcttctggaaacggtgagggctccggctccggctctagctctggctctactggtgaggttacagtgcccggtgtcgcccctgtgtcgccatcttcttcctccaagcccatccccagtcatggagcaggaggcttccacgtcggcaagccgtcctcgagcatagccttccgcccctcgcccgcgcgcactgccgtgcctgccgtgcctaccgtcgcgaccaccgccacgaacacacccgcattgcccaccaaccaagagggcgtgtctccggtgtacaccggtgcagcctcgcgttccaacatgaccggcttgttcggtggcgtcctcgccatcgctctttccatgttcatgatgctgtaaagctgcccacttgcccggacagcatgatctcatcatgcgatatgattgatctcacgaatgctgatttcaagacaaactggtactttctagcgactggttgcttttggttcattacgatgtttataatattcttgttcatccgatctccagtctctggagtgattcgatacctcctggcctctttttgtgatttactctggccagtagcggtgagaccatcgtgttcttcgcattgaagtttgcgagcggtcgagtccgtttcaattccctaatgatatccttttcaagtgtggccatctagcctgacttctctcatttttatttcctgtttccatatttacaacggacaacgatgctctttgtataaaaatactacccatttgcatataatgcagtgaagagaatattatcaattattttctggcagttaaaatcctgtaatgacagctttccatctcaataatattcatcatgtcgatgatcgtccaatagctgtgacaattcccccgcattccgacatccacggacctcggctgcggagaagtaataaatggcaacctcacttttgaacttcgattgttccttcaaaatacataaaatgctaccattgaaaggaatcaaagtcatcgagctagcaggcctagctccaggtacgcaatcaatccaagaaacatcaccatcacaactaacatcccaccccaggcccattcgcaggcctcctgctagctgactacggcgcctcagtcctccgtatagaccgacccaactcgacaagcgttgaccaattaacccgcgaccaactaacccgcaacaaaacctccataacgctcgacttacgcaaccaaaactccctaaacatcctcctccgcctcctcccaaccgccgatatcctaatcgaccccttccggccaggcgtcctcgaacgcctcggcctctccccaacagaagtcctccaaaaacacaatccccgcctaatcgtcgcgcgaatgaccggcttccgccgcgacggaaaatacaaagacatggccggccacgacataaactacatcgccgtctcgggagtgctgtcgacgctcggccgcgcaggcgagaagccccacgccccaggcaacatcctcggcgacttcgccggcggcggcgcagtctgtttccagggaatcttgctcacgctcatctcgcgctcgcataccggccgtggccaggtcgtcgaggcgaatatggtcgacggctcggcgtaccttgctacgttcccgcggttggcgaggaagactcccgcgtgggcgcagccgcgtggcgagaacctgctcgatggtgggtgtccgtattatgatacgtacgagactaaggatgccgggcggtattttgctgttggggcgttggagccgcagttttatgcggcgttggtgcgtgggcttgggtttgagattggggagcttccggagagggaggatcggacgcagtggcctgtcttaagggagatttttacgaggaggtttaaggagaagactcgcgtggagtgggaggctgtttttgatggtacggatgcttgtgctacgcctgttttggagcaggcggagcttgaggagggtggctatgagcagcggcctatggtgcatctggttagtacgcctggcaaacccatttcggcggacaatggtgggtggtcgggcggcgggcttttgcctggggatgggggcgttgacacgcttagggagtgggcggggtgggagcagggtaaggattttgaggttaggaaggatggggcttttgtggcgatggatgggaaatccaagatttgaggcggtgcatcatatgttcgagataatttagactatataactgggtctaacgaggtagatatatacttcagttcccctttcccgagatcaacacatcgcaggcattgaacttcataaatgccaaagccaagtcccaaaaaccatgcattatcattaccattaccaccaaatgcaaacaccagtctagatctatagaccatagacaagaacagcatgtacagaaacaagaacaagagccaatacgggcgacaaagcagtgccgccaatagcagcgacaccaccattactcttctgactatcactcttcttcgcgccaacggcactactagaagttgtggcatgagccccactaaaagccggctcgggctccgatacggagttataatattcgcgaatgatatcgctcgcctgttcagcgacaccatatgtcgaggacatcaggtgcgtggacaaggcaatggggatgacgctggcatccgcaacgcgcacgttagcaagaccgtacacgcgcagattggcgtcgacgacaccgccctgcttctccggcagcatcgcgcaagatgaggacgggtggaactctgtgccggcttccttgcgtagccatgctatccagtcgtcgtcgctctggacggttgagcctggggaggtctcgtttgtgaggcttccgctcattgggctggtttcgccgatttggcgggcgagtttgatacctgcgagcaggatctcggagtctgggtattgttagtgttggggacttggtttgcatgttagatggggtacataccagctgggttattcagatagttcgggtcgattacagggtagtccattgggtctgaggagttgatgtagatacggccgtggctgaatgggtgttggagggcagctgtgatgccgatatcaccgtttccatcgctgttcatgaacaggagctcgatttgacctgtcgggcctttgaagatgtttgatgtcgtgttgcagattgctttgtagccggtgaccacgccgtcgtcgtaagtagtgttcggtgaatactggtcgattgagtcgaggaatttcgagtcatattcgttgactttactgccgtacatagcggtcgaattcacataggcaacggcagaatcaatgtatgtgaggaatttggggttgttctgcgcgaattagcatctggccttgtttgatcgagtatatacaggacgcaccctatctttgccgccgtcgtaaaagatagaacctgcggtgtccacattcgagctccatttcaccgtagcactctgtaactcggtcagtaatgctcttcttatatataggaagcacactcacaaaatggtcttgaaggtgttggccgacaccaggaagttcagatacgaggtcaacaccagccgcagagaggacgtccttcgggccgacaccgctgtagagtaatacagccgggctgccgacagaaccacccgctaggatgacttccttgttaaccttgaccttcagtttcgttgctccgccatcagtcgtgtactcaacagcactcgctgttttgtcggaagaagtagaattgtcgaaaacaagccgagtcacatgcgcattcgccaatacatcgtagttatcccggtctggaagcggatcgagatacccagaacgactgtaggagcgcgtccaattcgaagggttgatgcatgaggttgagacgtccgcgcccaggttctcacctccgtacatattggcagaaatacctatccccatgttcgctagtgacgttaaccagtagcccacttcggggaatgtgctaggaatgttagccttatcgatcaattccagagaacaggattcagcatactagtccgggtatgatgtatggatcggcccgccggtgccatgatttgatgcattccagacgattccagcctcttgaactacatcatccaccgggggagagaaagtctcgctttttttcatagcagcgtagaatgagtcccacgaccagttatcggctccgtccatatcaccgagcatgtctttccaagcattgatttcgtcttcacccggacgggtcatgtatagtccattgatggcggagctgcctatatcatatctccgtgtcaatcttatgttgcttattctttgggatatcaagcttgtacatacctccaaggaccttcccacgaggccactcaatctcacggtcgtctgcattagtctgcgcaacagtgtaaaagtcccaattcaaaggagtcgtccataatgaatcgaaataagcatatgccggtgtatctgtacgagcattagaaatcgcaaaccccgcggggtcataattaaacgcacctatgcgcttccgataatcatctccattcccgcccgactcaagaacgagtacggtatggttcttatcctccgaaagacgagcgcccaacacgagtccagcttgacctcctcccacaatcacaaagtcataagaatcgtcgatttccgtgcgcggcgataatgcgttcgcgaagtggcttgcgactaggctggcgcctacgatctgagtagcggatagaccagtccgcattgtaagagtggacgcagattgtcgagagtgggtgaaagggtgtatctcatatataaattgccgatcagattgaccagggttaaggctgtggagaaaaacccttgaaaatcttgttatgagcttgggaattcccgtttatcaagtttacgcgcaagatcatcccagataagcacattctgaagcctcaatcgcgttagacaggcgggtcaatattggggttctacaaatgagatcttggttccgctttctccacatggccttttccaatgagtcaactttattttcgaggtacccgtcctggttccatgtttagtatcgctgttcctggatgaggtcgaattggtggctgttggtcgatatgacggtcaacccgatatccccaaatactcaatgtcgcatcaccgacaacacatcagtgctgtgatggcacggctggagatatggttgctatgcatcaaccgcggatccagagccaataatggcctagaattatctccactaacaaagaacacattgacggtgggtctcataacatattctcataggctgacagttagatgatcgcaattataatccatccagtagccagccacgataaaggtgtgtatccagaaggttagaacaaagccccgtcatagtgtctggatttccatggacatgagatgaaacatcaatgacgaaacagggaccgatcgatctgatcccaaattgcatgtttcccattggcagtgatcaagtaacatttattcaacatgatctcaaacagtggaggttcttagggttacgcttgtcagctgcaatttatttactttccgctaatccaatctgagtctggccctgtgactagccacgtcgctaaagttcgacgattttacgatcagcttcttggttcgatccattttgaagagactattgattttgagtagaaatgtggaaagtcacactccgtatgtagtaacattggttgtacaaaaatttttaacccctgaattcattattccacggttatatgatccatggataaagccaaatgaataatcgttctgtccttggattacctcgcagatagattctttcaatcacttgactgtaagggtcctgtgcccctgtaatagcatttatgccagtattttggtggtgtttgtccagctatcgcggctaacttgatagactacaatagacgatctcccttctttgcccagttgaaaaaaggaaaaaccagtgatcgtcagtaagaacacccaaacggtgctatccgattgtcattaggacttccggttggcctggacattgccatacgtgttgaaagttgtgaaaagatgagatttgaacggaaaggctgctggttgaagtggaagtcgaaaagtaaagtgcattggtcgaagcccaaatggggaataaaactttgtataagtatgaggcgtagtacaaagagcatctcatcactatgtctttttagtaattttcttatctctatttttagatctcttcgtagatctcttctcgtttagcagcaaagcttcaattcgaaatacgctagttaatggagagaagaagtaaaagcaatatcatgaaaaaagtaaacatgtagcaattacgtttcatcacacaggcatagtcccaggggtggttgcaaatgcctcttccaatatctccaaacctctaagcagctggtcctcagtgatagtgattggcggggcgatgcgaaaggcacccccaaagctaggatggctactgagattggcccacaagcctaactcataagcccgatccccaatcgccttacccaaagccagcgcagggttcttggtctgacggtcctcaacaatctcaacccctgccataagtccgcgcccacggacatctccgatacagccgtacttgtccttcagtacatttagccgctcatggagtaccttccccatagcacgagagtgctcaaccagcctatcacgcaccacaatctcaagaactttatcgcccacagcagtaggcagtggatcattaacatgggtcgtgtagaagcagaagtcccgctcgacgcacacgcgctcgatctcagcactcgtaacgacagcgctgagcggcaggccattccctagcgtcttgctaagggtgaggatatcaggaacgacttcctcgtggttgatagcaacaagatcgccgcaccggccgattcccgtctgcgcttcgtcgacgatcaaaagcattccacgcttctcgcactcccgctttagagccttgaggtaccccggtggtaggacatgcatgccagccgacgactggatacactccacgatacaagccgccagcgatccgcacgattgcatatcgatcatgcgccagccgtattccatctcggcttgccagtcgtaggatccgtcggcgttgcgaaagatggagcggtatgcgttgggcggtgggagcatcagcattcccggcatcaggggaccttgacctctgcgaccgaagtggtattgtgtgcccagtgcttgcgcggtcacgccatgccaactaccgcctagtccgacgatctcgaactttccggtgtataccttagccatctttatcgctgcttcgttgctctcgccgccggtggagaggaagaaggctttgtcgaggccgggtggcagcaggtcgcagagacgttcgcctaggctgatcactggaggtgataccattcctgagaagaggtggtctagggaggctgcgtggtcggtgattgtctgtacgatttctgggtgcccgtggccgagcaggcaggacatttggccggatgtgaagtccaacactttctgtccggaggctgtgtacacgtagagccctctgctgccacagatcacgtctttgttgaatttggttccatagttgaggaggtactttgctgctttggcttgaagttcttgttgattgacatcattatacaagataggattatcagtcttcgcgggcctgattgtgactgtggactcttctgtggtgattccaggggccatgacggggatatactactgacaagtatgacgattctgacgattctgagtacttatctctttttgaggactcacggcctctttaagtttcttgttcccctcattgatgagttagggtactttctcctctttcgtcttatcttagccgcggagccgcggccaacaggtgtcctcgggcatcacaaagttctcgtatctaatgaagagacattaagttgctaggaactaaagcgaaacctattgataacgaagccaggttcaagcaatagctgggtttactgccgaatacctttactctagtatattccttactccggacttcatcaatttgccacttttatacaaaaatatggtaaatcgaagcttcattttcccgtaatctgctgtttttgaatgatggcatgtaaaatattctctgagaaggtcaagtgactttgggctcacattgacactccaacggatgtccttgagccgccttttgttgacctggaaccttgaaacaatcttttaatttatgatactcggccgcaagtgtattggatcatccaatattaatgactggaattacaggtattgtagaacatcgttaaacgacctatagatacaagaacatgccttcaatatgcattaccatcaccactctcaccactctcaccatacctcaaatcattcagtccttatacctattggcctcgataggaatagcacagccagcaggtgcacgtagattgacgtagtcagctatccacggaccctcccctctaccgtcccaccatttcatttaggaccaccagcaggtccacagttgtattgcagttttctgtcagagtctccaacatactgctgaacaccatgattagtaacattgatccctcgtccggcaacgctgccaacttgatttgggttgggcgcgtatacaatagcttcgccacgttctataatagtggtgccacctccacaggcacaagaattgacttctttcacgttgactgtgaaagccgtgacggcctggtagaaaagaacacagatgtctccacgttcagcgggaacaccattgcaggtgaccgtgttcgagactgaataagtctgggaatcggagacactaaatccaacagaatcaaataggttgctgacgcccagtagttcactagtcgttctgtatcaacaaaggtactatccatgcggttcttagcatagacatagtttagtatcatcggattcatggcttagcggtattcgagaccaattagggctagcgtagcgctaagaggctctcccaaatcccggttcatagatcgaaaaagctcagctgccccacaaggagtttctagttggcaatacatggacccctctttcactatgtaatgcaaggccgtggagatgctaccataatccatatcctatatatctcaaacctataaaaagtactatatctaaattgactgaccatggtagtattttgctcacttgaaagcgttaatcgagtctaacatcctaaagaaccatcaccggaaaatcaccggaaactgctatcttaggcctagcttaagttaagcaacggaatgccgtcggtaccctgtggacctccacggcttggcctccaagatggtcaacgtcgccccgcaacacgagtagcttgttaccccgtagccataccctagtctgacaaaagtccctgatcgggcacatctgatgtactactggccagtctgaatatttgatctctgggtcctcggagaatatgcatattatcaatctcatttccaaattgtggcatgagcaccgaactggtcctaaagtcgaatggcgacaactttggtctgagactcattaggaaaatggcgctttggacgtgaatatgtgttcttgctcccaccttttgagagggtattagcacacttcatttatttcctaccatggtctctacgacgaggagcatatcattgaatcaagacgagttggtccttgaggaatttatttttactatcctactaaatttagccttgggaatgactatatgtacccccccccccggtggcctgcctgaaatttcagtaccaccttccagaatgggtgcgatcatgggatcataatagggaaggaagtcaatactactaaatttaatacactctgaggaaactttgacattactggcaatcatttgacttccatttcgaagttacgtggcatgaaacggaaagtttcaactcacatgccatagaaagaacaatagaatcgacagtaaacgggttcaaaattctatgcgtcaacatgtgtccatatcataatatatttacccgaaagggccatcgagaagcagccattgttgtttgttctttatcggtaacaattgcacaggaatcttcgagattcaggaattcatagcttcagcagacaaattagaatcacttcgcagatccttttcatcatcgaaaaggcaaatccaagacgaagcttgatccagtagcagcaaagccgacaatagcaatagagctgtgaatcatagcgattcgtcttgtatgtgcagtccattgacatcacccaaggcttcagcttagctatagcaacgccagcgacacggttctcgtcatcgtatttgaatatccattctccacctcccagaagctccacagccgtagatagtgtgatgactagcaagggattcagcaggaaccaacaagagctcggtgcatacgcaccaagttcctgttgcacatgatcgcgcgcgcggagaatgctgctttgacatttgcatcgatatatctttgcaggaccaccaaatcccttggagatatgaagaagggttctgaaggaagatggagaggacaaaacgagtgtattgtcggggtcatatgctgggcacatgaccacgcatccaacacagccccactataaattcgatgattcttgttcgttgatgcagctcatctgttgcagaaatctctccaggagtggcattttgtgtcgagccgtgggcttgttgccgcaggacttccatgttggagacatggacaaaatcgtgatcgtatatatgggcgagaacatatgaagaatgaagatagttgggagtttaaatatacgacaacgaatctcctccgatgagaaagaaatcatacatgaggcgtagaaagagctgtttcatctgcaagttgttgaacgctgtgaccagtcgaaccccgatcatcgactgcgtgggaacctggcgaaccgtctttgctcaaatgaattttgtaatcttcttcccagatttcaatgatggtagtaaagataatgactggcagtcgaaccgacaaaagaatggagtggagggttaatggaagatgaacgaccgtgtagatggtagaggttggaaggagatgttgtgcagagataaatagtgcgttggtgaactttgcgcgtagcaaggaattgaggcgacggcgagctcacgttgagagcattgaaagcattgaaagtgttgaaagcgtcaatgatgagctagctctcgacggtaaccttcttttcaggtgctgatgcttgcaaagatctatcaagtgccatccaatatatcgtagtaattaaagaaaggaaaaagaaataaaaagattgcttttgacatcagccagaggatgtgcttataagaggataggataagggagatgagaaataactccccagagctaacattataaagcaaagacggggacaagagaatgaagaaggaagtgagcgaaggaaaagagtcagaattaaatacaaagaagacaaacaaaatgagaacctcaggacgtaattggtgcccgaggcaaccgtacatagaaagatatatgtcgctctcttgcttttaccctcaaaatgctaatctcgaatatattcagtaggatatctatattaaaacattctaacggccccagaaggccttttggagcgcatcacacatcagagtgatacacctcttgccctcagacaatgccccatccatagccaagaacggatgtggcatacccggcatgacctgcaagtcgacaggtacaccggccttctgcaacttctccgcatactgctcgccttccgagcgcagcacatccagctcgccaaccataaccagcgcaggcggcaattgcgagtaatctccatcccagaacagtgggctcgattctgggtgggtgcggtccgcgtcgttggggacatagtggtcgcggtaccagtacatcttaagtgcggggagtgcgggggtccattcgtatcgacgatatgactcgttgttctctactgtggcagtgttgtctgtcacgggaaccgagagcagctgagcgaggaagtgaacaggcggtgacagagtcagtgccttgtgcgtgataatcgcggcaaggtttccgcccgcggaggagccgccggttgcgagtttggatacgtccactgggagtgcggcggggccgtcggcaatcaaccagaggaagacttcccaacagtcatggactgcggccggccaacggttttcgggtgcaagactaggagaaagaatataaattaggccgaaatttctcaaggttatgtatgcatggcgtgattaggtagcttaccggtagtccactgtaatcacgacgcagttgcctcgtacacagagattcgagcacaccacattttccgtgtcgatgttacccagcacccagccaccaccgtggaaatacaacatcaccggccatccaccaggaggcgcttcgcccttgggagtaaagcagcggatgggcactggtgggccctcggtagctcgccgctgaacagtaatgtcttgagtcttgccaacctccagcataggacctgcaccaggaatcaagacaccacttgtccgtgacgcttccacgggccgaaggtgcacttgctggttattgatgacatgctcgttatagaatgcgacatactccgggtgcaacaagtctttgacagactcgtggagcgggtaaggtggttcagtaatgccggcagtcattttggcagttatttagaaaaataaaacacaaagatcgtcggcattcagtgtctttgaggtgttcaaatagggacttggaaagtgcacccccacgcgcagagtggggagaacaatgcggggacacgctgataagctgataagccgattgcattccgctttgggaaaggatcaacggcctatcgcggtgggccagtgccatctcagggacaactgcccgccgtctcttttatttagtatcgagtgcaacctgcatgtatccactgcgcccctcttaacgtccataacgggccacttcatgttcctcggatcggtcttatcggccactacggagccacttgttacgttttaatctcggctaacgtgggatgtagctgtagctccggatgttgccccccgttgataaaaggacctcccacgcgcaagggggggcaacttcctacttctttccatcttttctcaattgactcacccctaactcatactcccttcacctctcacagactttcacaatgtcctccaagaccgccgtccttaccgacaaggcccccaagcccctccccgggatctactcccaggccatcgtcgccaatggcgtcgtctactgctccggcgctgtccccatggacgccgtcactggcaagctgattgatggcgatatcaaggctcacactgtaagatccaacaatatcaattgacctaattcaacctgctaacaccctattctctaacagcaccaatgcattaagaacctgacccacatcctcgaagaggccggcaccgacatcaccaaggtggtcaaggtcaatgtgttcctatccaacatggatgatttcgccgaaatgaactccgtgtacatgcaatactggggtgatgtgaagccctgccggacgtgagttcttaccccgctcctgaatcccttgcgttggagtcatttggagtcatgctttgcccctccatttttgtactctgcgtgatgcttgcgcttgcgcatacagctgtgcgactctgtatgttttatggtttgatttgttgctaaagtatatactttgcaggtgtgttgcggtcaagacgctccctctcaacactgatgtcgagattgagtgcattgctgtgctataaattagttctggcttttattggaatcaatagacaaaattcgaaaatgattatatgactactaccgcagaccacctttcatactattgcagtaactttgcaaaccaactcggatgaaagccaagaccttgacagaccgccgattatcaccgcttttccattaaaggcagtctgtgtacttaccccgcgatgcctgatgtattttctctttgtacaaaacctgcaactctactttcctatttcagcttaaaacccgtcgctaccataaatatgatatattaagcaaagagtacgacctagcaacgatgagccaatcacccgatattttcactcaagaaattcagcggctgagagctgattacgaggagaaaaaagaccggtccaacctgggtttcggtggtgaccgacagataatcgacctcagtttggaaactgttgatggtgtgttctgctacacgtattggtatgagggccagtgtatccggctaggtgatatacctggcaccatctctggcgatatccttcgcctagaccaaaacttgcccgtttcagttgacaatggcgactatgaaattattggtgaccaaatacgtccgctcaagaatgtaccaccactcccagagcacgatgatgactccgaggaacttgatacgattcttgccttgctgccaatagttgaagtcgattccaacaagcattttgtcaaggaaggcaaatacaagagtgagatcaagaatctgcttaaatgccaaggtggatcctgcccaggggtgccgaaatcatcccacatcatccaattactgggaaggtcgccagatggggagctggtgtttgagaaatttaaacctcgctacgtcttggcgaatatttatcctctcgccacctacaaagactggattctacagataatctccgggctaaggatgctccattcacttgggatcatccatcgtgatctccgcatcgacaatatcgtcttctcctctgacatgtctcgcctgcttatttgtgatctcgagagtcgttggggaaatcgcctagcacccgaggtttctcgcgagccggtgttagattctggctggactgagaagtcggatatctatgaccttggttatctcatcaaaggcatgatatacgggaacgtcccgtttacgaacgcggtggaatggcatgtccccgcccctctagctgccgttgtggaggcttgcactcgtaataggcccgagggacgcccaggtttgtatgaacttcatgctatggttgatgggatcgagataagtacttgacgatatcatgaatatgagacctcgggacatctgtcacattgataggcatatacccatgatgtatctgaacgtatatgattttattttcaaaagcaaacagtgagagggatggagttgaaggaactgtttggaatggtgaataaaaacgttccaagggaggtgtgtcctcgcccccctgcaggtgtatgtgggaaaatcacctaggcagtcataatttcctatattccctttattccagattatttacatacatgttcattcttcccttgtaattttcataattaaagagacaaagaaaggacgggcttattgggcaaatcctcattaaacggtgcataatgtgcggtgggtgtattaggaaaaacagtctagtctgatataactttgtacaatgcctgaagccaattgccatgatagcgattttgcaatctatgcaattttccaaaatttctaaagtcggtgtttatcagacaaaaatcggggtgggggttacagtgggggtatggtgggtctgaagtgtgaatagcttcaaaatgatccccaaggggaaataaaaaaaaaggccgcagaggttcttcaatagcagttagccggacattttcctcattggcataggatgcgcctcgctcagtgtatgagacaccaaagagtagggcgctgagccatgggagttggaggttataatgtctgggttgacctttccattgataatcgctttagctattgtttcttcctcagatagaaacccaggaacaacccgtgccttccaatagttgtagccaactgagctttggggctacctgaggagaatatcaggcaagaccgcatagttcagaccacatagttcctatatgtagggaaaatcccctctcctgactccattttctgggatataaccctaaacgatcgaaaagcagtcagtgataggtcagttatctctttgggcctcttgtggtatagcatttgatgtttgactgactcgatggatacttcggtaaacattcagtattgttatatataacgactgagttcattaagccgactatagttcataaaattctgagcgaatatcaaacccgaactctccataatagacaatctctgtccaagacttaattggggaattatatgacgggtgcctttcggtggatttgtcatttgtgtataaaaacaccgcgcattggggttatggctaggatgagcagtttatcagaagcgcattccacaacgtgaaactatcagaaacacttcattcaggtgcctgtcaaatccgtcagattgtccatgaatccaggttcgtctggtccttactggcaaggtcaacccctctgatcacgtgccgtgcacagattcggaacattgggagcagacgaagcgataaccgtttaccacagaattgaaagtaggaaaacagagattctttttgaaagtgtgcaagcttgattccagtattcaaataacttgttgcaattgttggtggtcggagttgttgaccacgtcatcgagggatccagggcacgatcgacttcatcctactttcacctccaaggacaacccttcgatgcacggagaatcattacaatgaattcttagaagatcgaaatttcttcaaatcttccattctcagggactgaaacgaactgacatctgtacagacaaatccacagggatacggctactaacagtcaaaccctcaatacatccctggcactagcaagtcctcagcattccaagctatcaagctaagatggaataccctttaaagagagggtcatgctcaatgccttggattctttcgacacacgcccctcggctgctacattccacccctccacgctatattcgcgtcgacgcgctccagggctaagaacccttcattaaagtactctttagcccttcaacactcctctgggtaccaaccttatgtatatgctatcatttgcatccaattgatgaacttggagtgcgactacaactgggttcgatttgtacacggggcattcaacacgcctgtccgttacctactacacactcacattcttacctacccggcttccgagcaggcagtttaagagggcgacagacagtcgttcttctcttgatcctctcgagatatcgcaatcatggcttctggattttcacctacaccacgaaaggagggaacatggacgaagcttgtgatatttattgcgctatacttgctactcctcgagtctatattggaatgcgtgctcgtgctctacctttacggtaatggccaggttgactcgaaaatgactctgagtgttgtacttgcacttatcgcagtatgtttggcttgaatctttggctattatatcgtctcgctgactcttattcagtcttttctctcggtaccgcttgtcagccttcaaagcctggttgcttggcaatacaacaacattggtggatttggaacccaaaagactattctgcataatgtatgcacatacgtgctgcgcttggatcttatgctttggctagctacaagtatagctggtctagtggtcgctgcacaacaggtgtactgtcttccggaagggacagacggatccttctggagagttggtaaaagctgtgccttccaccgagcatctgtgattgtggctgtgatttcaatgtatgcagcatcctcgttccttggcttctttacttgaactgacaatcctacagggtcactgtgtgcactatgtactgtgcaagggagctttgcgatcgaccatatgatgtatcacttcttggtatctacaagcgccagaaggttctcagagacggcagtatcgtctccggcaatagctgggatagtgaggaaacgctcaagaacgagattctctatctttgccgccaacacgatggaactggagccggggagttctggtctgcggacccaatcgccaacagagtcatctgccatcccagcgtccggcatcctgctcccgtccgtctgcggcctcaactccgagtcaacactgaatccggttcaacatatggagaaattatgtctggaacgacgatttcgccagaggacactcaacatcggatctcacccggatcacaaagcgtggctagcgagttctatcccatctcgagcacatctactactatgttgagtacgcagacaaccaacgagttacgcgctcttctctctgatgcgtttgcccccaaactaccggccattccccaggaacacaccagccataagagaggaaagtcatcactctcttctatcagacgtcttcttccaaagtctttcccattgtctcttccactatcagaggatcctcaaatccaagccctcgcagaccccaacaccgcatcagacgtcgagaaacaggttgtgacaccaaatagcatgcctaagggtatccctcaatcgacaacctaccaacttgtcgcaaacggcaacactccaaacgcctcttcagcatccctcccgcaaagccctgccaacacccagcccaaattcaacctagcacaggaaggccacacccgaacaatgacaatgaactccgccgacgccccagaagtagtcccaacaaccccgtcctccccaccaaaagtgcgccgctcccaaacagcatacgccataccggaaacgcgctcaatccaccacccacaccacccaaactacatcccacgccccccttctcaaccacaaccacgagcatactcccagtcccgccgacaagctcccggtccaaaaatacacccagactcaagacgcaggaccatgcgaccccaacagaacatcatccactatccctcccgcagctcatcctaccacttcgacccaaactacgtcccacgccactcgcagagccagtacaacccccactccaacccccacgctagcagcaccagccagtacggacaccagtcatcgcgctgggccaaccagcgccgctacggctcatcagcccggtccatgccggcgccgatcccccgccgcagcgacgtcgaaataatctaccccagcacgcgtcgcccgcgcagcagtctcccttccggcgcgagtggtccgctcagctgtatcttggagacgactgaccccaatgcgtccggggataatcacaggcctgtctcggctgcttactctgagttgccgtcgaattccattgatcagacgaaataccggggtgcgaatcggacgagtttgggcttctattgagggggtctttggatggtgaagttggaaagagtattaatcgttgtttgtctgcgggtcggacattcttagttctattggtttactttgtaatgttgtatgatttgtatcagtggatagagatagatagtatgcccagatgtagcagggtgacttggttacttccctacttttagtgttgtagttagctttttgataccaaattgaatttgttatacaatagaaagacgaatattcaaacataattaaggagcgaagatacaaagatcagtacaaaaattgatttcgcactcgaaagcagcaagatgcaaaatccgcctcaaggcgacagcagaacacaccgcaaagacatgcaatttcagatcccaaattccattccaggaagtacaccagaccgctagaaaatgaatcaagagaaaaacaatgcaatccccaacctgatatggtacataaacacaaaattaaacaaacccatctaagccctagtctcggtgcttttagacttctgcttctgagcatacttgtagcgataagcctggccgctcttggcttccacatcacggtctcggtcacgacgacggctctctttgccgtgactctcagccaaagaccccggaccccgacccagctcattctcgccccagctcatcatcaaagccttggccatgcgatctcgctccttgaggaggaggtcgatgcgccgctcccactcgcgctcgcgcttgtccacagacagagcgatgcgctggtccatcgcggcggcggtttcgtcctttccggcgatgatgtcttccaggcggcggagctctattttgaagctcttgcgtaggtggttttcggaggttgcagatgaggcgcggagagttgcaagttccgagcgtaaatcggcttcgcgttgctcggcggctacgaggaggttgcggattttgcgcattgactcggcgtgcgaggcgcgcagtgttgagacggctgttgagtgtgcggtgtgcaggctgcggagttggctttggtggtttgcctctagggctgcggtgtccggtcctcttggctctgggttgagagcttcgcgcgctgttgggggtgaagggggtggactaggaggttcgacgaccctgtcttcttgcaagcgggcgatggtctcgagggattcagcatgctgttcttgcgactggagtagattgtgctgggacttggttagggctgttgtgagctcgcttactcggttggagagtcgcgagttctcggtttcgatggttttgatgagggtctgagcttcagtcgcctgatcacgcagacgagctgcttcggtatctgcagctttctgggcggcggataactcccggagttcttgctgaaggcttgcaatgcttggcatgtctggctgttgcggttgctgcacgccttgggtgtccacgaacttgtccttcaatggcgagtgaagtggggatgtgggatcccctgggcccaaatctttgatcagatcgagaatctcgctgtaggtgctgtggccactgacaggcagatctgcagcagcagctttgagagcactctcctgggcttccatatgggtttgaacacggctgagattttcttccagtgtgatgttcttttcctctagaggtcgacttctaacttccaggtcgatatagcgttcctcgagaacctggaaatcattatgcgcacgctctaattccgactcgagcttctcattctccagtccataatcatcgatctgtgcttggagttgatcaatctccgagttcttctcctgtatttgtgcatccttagcccgtgtgacttccttgagcttagtgaatgtctcatctagagtttcatcgcgctttcgcacctgctcttgggaaatattgagttgctggcgcaggtgagcaattgtctccaatcgctccttgtccaaaggagtctgtgcgtctctgttttggagttgctgttgcatctcacgaatctggttcaaaagaggattgagatccgttgtgttcatgctggactggcgtaatagcttttcatgttcctcattcttcttttgaagcgactggacttgctcgcgtagcattgcctcgttgctacttttggcattcatctcgtccaagagagcattcttctgctgcaattctgtctggagatgacggatctgctcactagcagaaacagcctcgagaatacgactgcgatttttcagcaattgattgtcgcattcattcatggcgtgttccatacgtgcgatctgctggtgaagatcctcattctgctcctctggtgcatgactggaggcgtccgacaattttcggacggaaggggatgcagaatcctgggcctcgtcatcgtcggggtattcttcaataccttccagatgggttgaatctttgcggatagcgctagtccggtgcaacaagtgtgaaggagtcgacatatccactggcggtccgaattcactgtactccccagagtcggcttcgtcttcgatgaccggttgcttcgatttccggaaagatcgtcgtactgatccgtagtctacttcagcttcgtcctcctcctcttcgtggtttgctccatcctcatcgcccatcaggtatttctccatattcgcagtaaagtcctcggggcctccaacgtcggataatttatctacatcttgatggaaagggggtagagtttcgtcgttcccatccataggaaaatggccgctcgggaagttgctgaaatccaaggtgtaatcggcaagacgcgcatcgagatctgagcctgtcgggcttccaggagaggcggggcgagagcgatgttgcatttcattatcggaatggtatccatagtcacgagcctggtcacgaccgtggtcgctacgtttcgctgcgacgcgctcggttgaaggagtctgggcggttgcaggagtttgggcgggggacggagatctcaatgggctggaaggatgctggggaggagaggatggcatgaagagaggcgtcaccaatgttgactgtccaatggtgtcatgcgaggttggaaatggcgaggtatagcctgtgttggccatggttgcgcacgcgtgcggatgcgcaaagaggagggcaaccggcaacgataagctctgccaatttagaggtcaaatacaatccgccgggttgcactagagacctccaaaaagaatattaaccgagtaaatagagaaataacaataaccacattgcggggagaaaaggggagactgaagaatctcgcgacggtttgtattggggcgcctgaggcagcaatgtttatctgcctttttaggtctagcggacatttgtactcctttacttctctgttcatgtttattcattcttttctgaaagggaacttatactttgtataatcgtagatcatatatgtccgcctactgacgggtacatatacccatggatggataactatacgtacacaatatggtacatgttgatgattgtaagatgatcctatgatctacctcaagctaggggggtctggtcacctgactaagccacgttgcagttaactggacactcacgtgcagactttatgcaggcaaaaccacattgaaaacgctattcatcacatctaatcttgacaacagttgaaattcaagtatagcatatttgtccgaaatgctagatattcattgtgcttcattggcgtccctgatctagcatatcttggaacaaagcattgagactgctcgccatcggccctgccgacattaactggcgagctgccacgacaagatctttcatacccatggtcaatgtcatctccgcagcccactgccacggttccgccatgcccccaggcagagcattgtaatactcccaacccataacgccaccaaagttgggaaactgctcaatcaacattgccagaacaggtcccatcctctcctgagacacataaccctgcgatccattacccgggtttgtcaacaggccgtatacaatccgtcgcggagaccacccctgggcaaccatagtagcgtacatccgtggatcctcagcaagaccccagccattgtagaactgggtattgtaccagctgatctgagaagcacgagcctgctcgagttcacggtagtcgaaccctgataagttcccaataccaagtaatgcaactgccacaggggccagggtaatgatgaatgcgtcgcccaggtcagccttgagccggtcgatgagtcggacgatgccttgcaaagacatggcctcttccacatcgagatcaattccatcaaggccatggcggcgaatcatggtcaggaaaggataataaaattcttcaaattccatccggctgccgtcaagccgcgtgaaggtgcccggggcggccccgcctaacatgcccatcactttcacgccttgccgctgcacgactggcacttcggcccatagggggtcgaatttggggttgtctggtggatcatcgttgagagtgatgtcccctggtgcagcgttcaagtgaaaagcggcgagaataacatgtgttattccggtgttgttttcgaggagcgggagcatggagacatactgacccccgcctgggatgagtgtttggtggtacaagatcacccgcggacgctcgccgagtccacctcggatcggtggcattttgaagagagcaagatattgaatacccagctatgtgtaatttgtaggaaattattccatggacttcgctttgtgggagctgacgacaagcttgagctttggcggttggtagctgtggggggttcgggatcctccaagctcctagcgtccgagagaaacgaccacagagaagtaaatcattaatgaactccagatctatgcaatggcaaattttaaatcatgtataggatcagccggggaatatcgctgcaacacaaagtagtagatcgggctgaacacctgcgcacgataaacccaaatactcactgactaagctgaatggtagatccatttttgggtaaggctaccacctgggcagcgcttacaagggactatggctattgatttgggataaagtaggctaagtacttatataatttgaattgtatgggacttctagggcatccacttcacacgggcctggattaccgcctcaatactagaaccatggacactgatccctatatccatggcgttgaactcggctcattgggaagagctgaagaatgacatcaaattttgattccggattagtcctccagcaaattgaaacgaacaaccaggaacatagtgtatctcaatgtggacttcccagacatacacgaatgacatgtatccatctcacgagagatagaaaatgaaccagtatatttcaaagggaatgtcgtatagacaagccataatcgccttcgatgagctgatggaggcaaactagtcgtctctagagactacataagttgcaggccatgcccaccgagccttgtggcgaagcaatatcttcttgcggggcagcatatacttctaagttctggtatcaacttcaacactcaatatcatgatggcttttaccatcagtactcggatcatgtcacgtccgcttcttcggctgctgccatccgcacagtctgtcaatgttggattgtggcatcgttgcagtgtcgccacagcatccaatcatccacaccatcctaaccctgggaatttttcgaatcgtcctaaacaagagctttcagaaataggccacaagggtgggaaaaaaggcgggaaagctaccggcgtgggtgggttccataatatggattcagagaaacaggtgagtgccacaacatcgatcaggaaaaagatctttcgttaattgtataatgcgagtaaacagcacgctatcgcttcaaagggcggtcatgctggcggtcatgctggcagtcgtgctggcagtcgtgctggcggccgtgctggcgctcggggaaaggcagtaggcaatggggaaactgagttagaagccgaacagcacggccggtcgcatgagccttcggtagttgcacctggatttgaagaatggaagacaacggcttgagtttcgattaatctgatttaagaaacaatttcatacaaatggacgatcctatgtttaatacaagaggtgccaaagctgcaaggtgcaatgacagacatcattgtatagcaataaggagcaactttctgaaacataaacgaatgtcaaaaaccaaaagagaaacaaccaaccaaccaagctcgctacgtccgcgcgacgaagattagcatatcgagcgaatcagatgacgtcttcaatcctctgtagctgcaggcaaccagctggtcatcttctgactgtggagggaccccacgtccgatttgcggctcgccagaaattgggcccttgatgaagtccgcggtgccatactccgctgggattggctgttgcgcaatctccagtgggggatgcttccacttcgcgatccaagcatcccaagattcggaatttagctcctaaagcttggtgctacataagtccgggtctctaaagaccatgatcgcgcctccaagttgaaaattttcaattgcgtgcgtcagcgagtccgtggtataaaagctaggacaaaattctttgtccgcattgtggctatgcctttgaggaataaataaagccagtgttggctccaatgtatcgagacttgaagctgattgtcaatagaggtgagtggtgtatctgctgatattgaagctgatattgaagctgaggttgaagctgatgctgagcttaatgacggtatttcggtgagtaatgagagagtctgggggatggtggtttcggagccattttgcgaaatgcacgtatcagatacgtggaagaagagaagtgatcaaccaaaacgtgatgatgaatgtgtcagatcgatggaagatgaagatctagctactgcgtgaagctctttaataaatttatacgaataaagctacagagatcttatcctctagaatctagaaaaaagatctctgcaggcggaataaagagtctgccaacacggcaatctgcctgcgagaggagagagaaggagagaaagagaaaccaaatagaggtctgcagactgcatagggaaacagtgaaagggcccaaatgtatcatatataccctacgataatcaaatactatgaatgttctgaaacagggaactacatatgtaatcgtacacaccagcaggagcgatctacacagtacatcggtacatacgtgagttttggggttcggttaaccaactgccatgaatcaacgttcataaatatatctatgcagtctcttaaaggcctagagaggtcccctactcagggattgttagcggttattctaaaaaaccccagaaagacctcaaaaaagacggatggaaagatgataacaaagtggtgtgcatttaggactttctctacggaatttacgagcgatttggatgttataggtattttagagtagggcatatgtcgagtttatgaatatgtgctttaaatagagaactactgcacgtgagcgttactagcctcagatttcacctagattataagtactaccaatgtaattaaagtaagtaactttgatttctggtcaggcaataacatcaattgtactatttatacaattcatctatacaattcacggggagttgattttcaatagcaaccaatacgattgccgctctggtccctggatacgtcatcaccctaggaaatcaccaagacaaccttccacccttcaccatctccattgtttccattgtttccatttagcatgaagtaatcttcactcttgacatttggtcatattgcctttcataatggcctccctacggcgtattgctgtggccacgagctcgacgatcatccgactgaccagcttcatatttctacgatgggtataaggtccccataggttaaccttgtgtttcagaaaactcacgcgtttacagatccctggccatcactttgtgcctctcgtggttacctctctcgtggtgtacctgtcgtcaataatctccttgctcaaggatacccagcctcacgaaagccaaacgactaaagctcgagactcgaatagtcaggctccacttccgaatgatcagaatctgagatactaacatgcttcacagggcataactccgtgtctagccgtgccaaagatggcgattctgtgcttaaaacactattgacagggctgccctctccaaagtggcccctgctgaccaggatcacaattataatcaatgtagccctggcggtcctgacacttgacttcttgacccgtggtattctactttattctaccacaaatgttgcattctcacgtattggatatgtctccccgaccactgccaacttggtctttcgcgagcggnnnnnnnnnnnnnnnnnnnnnnnnnnnnnnnnnnnnnnnnnnnnnnnnnnnnnnnnnnnnnnnnnnnnnnnnnnnnnnnnnnnnnnnnnnnnnnnnnnnnnnnnnnnnnnnnnnnnnnnnnnnnnnnnnnnnnnnnnnnnnngggcccccctaccagtggcggtcatgttccaggaggtctctgacctaagccaggactggtatgaagagggcatcgtttacaagctggatgactccaccgacttcactacaactgtgaccctgaccgacctgaagccggcgacacagtatcgctactcgctgtccaacaacaagtctggcacatttaccacggcaccattgcccgaaacttccgaatcaagccgactatcatttgtaacatcaagttgtctgaagccaaacttcccttacaacctactatcgcatccactacgggtcccgggcctcgagcaaatgaccgacgccctcgccaaactgcccaagctattccgtccatcattcatgctcttcctaggcgacttcatctacatagatgttccctggcgctttggctcaacaatgtcacactaccgtagcgagtacagacgtatctactcatccccctcctggacccacggaccagaagacaaccgcgccattgacctcccctggctgcataccctggatgaccacgagatcgaaaacgactggtcgcaaggcaacataaccgccccgtatcccgcagcagcagaccccttcatccactaccacgtgcgagcaaacccacccattcccgcagcacccttcgccgacccagacaacgtaacctacttcgccttcacccacggcccagcctcattcttcatgctagacacacgtacctaccgcaccgagccctcttacaagaactcaaccattctcggccaatcccagctccaatctctcctcgcgtacatctcgaccccagagccagccggcacacactggaaaatcatctcctccagcgtccccttcactaagaactggcacgtcggcaccacagatacatggggcgggttcctggacgagcgccgcaccgtcttcgaagcaatgtggcgcgcagagcgcgatctaggcatccgcatcgtcatgcttagcggtgacagacatgaattcggggctactaggttcccagacccggaacttaaactcggtccagatcagctgttgcctaacacggccgggctgggactgcatgagttcagcgttggcccattgagcatgttttacctccccatccgtacataccaccagacagactccgaggatgttatggtgaagtacgcgccgaatgggaatagtaagttcgggcttattgatatcgcggacgaggttgaagatgttggtttgaccgctgctgcgcctgttcgcgctcgcagctcggttctgacgtactcgttgtatgtggatggggaagttgtttggaagtatcgtcttagtgtcccattagaccgcgacgtgagtgtccatcgcccgtctctgccgccgggccgtgtggttgaggatgacattccggatctgagttggagtgtggtgcttgggactgttgtgggacgggtgccggtattggctaagcgggttgttgagacggttaatggtctttactatcaacttgcagatcgactagagaagatggagagacttgattagttcattagactagactgtttctcaaaggaagcgcctcgcttgctcggtcggatctgttcaaggcgagttgaaccaagctggtagtctcgaataatatagtagtaaaattagcgctagttcaatctaaacaatttccttttttaagcaatcatcaaatgaattagatgcccggcaagcccggagtgagatgggctgcgttgtatctcgttacatagctatgtggttatgaaggagggttttatacacggtttgcactgcagaacaggggactgctaaaccaaaaacttgacgccgtttgactttgccccctggatccgttcactggggtataagatgtagacaaaagggatgagaggagagtggagaccgaagaccaatgacgcatgcgataggggaaatgcttcttgccaatatggaagattcaagatatcgattgtcgcgaccagtaaagtaagaggaatagagaaatgaaagaaaatcggagacttcttcacgaataattaattgggtcggtagtggcgatatagtggctccaaatggaaggcgaagacaaagacctcatggctcgacggcgtcgattagaagagtccaccgctggaacggccgtgaccacctcttgtcgtcacttcgtcttcgttgcctccagcaattccgcccagcagactggcgccccagatgccggcgataccccacatgccaatacgccagccgcggtacaggccctgaataccttggccttgctgtcgcttcttctgtgaggtacgctggccgaggagctgcttggcgcgctccttctcggacggtttcgagctgacaccttcttcataaacgacatgccacatcgtgccaatgataccgcggtaagtccgcggggtagggacaatggtttccacatcggacgcatcaatagatgctgtactgatgctaccgcctgagtacttttggcgcagactcaaggatgtgtatgtagcgatctgggcgcgtcggagcacggtctcgagtgggaatcgcacggcgagttcaagtcctgagacaaggaaggcacacatgttccatgcgttaggatttaggagaggatcaatggacagatacgatttgaggaagagtggtgtcgaggtcataatgagggtaggaagacttgaatgaagcaccgtgattgggacgagatgcgaagggatcgtgcagttgggcgtggggagctggcggatagctcggacaagggaccttggcccatgggttgctggcgtgagcatcaggaatgtacgagcggtgtcgatgggagctaggatcagggcggatagcgaggttgaaatgaatgacaccaccagggttgccagaggggatgatgccgtcagaatgtccgctgtcatcgacatggaaatgtcctcttctggcaagccagcgattgccgatagaagactacggatgaaggtgttcaaggtgggcaggagaagtgagtaaatgaatgtagagttggaggacttccagagggaggttggcccgctggaggaccagagctgggataaaacttcggtcaaggagttcgagttcttgagagtcaagacatgtttagactgtgcggcagactctggtcgaatataaccactacggtcggtgatgtggtggtgtgatttacgagatcgaggtgtactcgggctcggcgttggaggggcagctgaggtgaagtaactggtttcatcatcggatgtttctgagtcctatacacaaatctgtcagtcatttaaagccatatattagctttagataacagcctccttactgaatcataagagcttccttcagtacccggcatcgagttccgatcccactgctcctctgcggcgtctggtacgacatacacctgcaggatggttttggcgacgtcgaacggctgtgcagtaagaaccttggtgtagcgaacaagcgctcggttcaatgcatcgcgggcccagtcagacaccgagggtgaagcttccagataatcggcatagtccaagtccggcatgaactcacgcgctgtgctgccaaacacctgggctgacgacggcgatgccacttcagcaggcgcatttgaagcgggcgataagccagacggggggatatagtaaggccgcaagggattgatcccttcacgagacgccataatgtgatgatgatcggagataaaggtggttcggggaaagaagaacgggaggagtggaatgtccgaacgcccaagctttgtcagtccttttttttcctccgcggccattggacggtcatcgctcgctcttccattttcgcccggatgctctttttttctctgttggctttcaaaatccccttttaatttatttattccctcttctacaacatggctttctggcgagaagttggtcagcagttgcgccgtgtacctaagaccggggatatctgtttgactcaatcgcggagatccctaagttattcaaggtcatggaggaacaccggaatcacaacacccagtcgctcgcaaaccaatgcacagagatcccttcaatcaccttggaaaggatataatacagcccggcgtgccttctcagtgactgcacaagctgcgcatggtcatatcacgccgcccaagcccggcgaagagtacgcccaccagatcgcagttcttgcgctgttgtactatttctgactgactctgtaggatcaacttgactttcatcgataaggatggcaccaaggtcgacctccaagttgccgagggggataacctactcgatatcgcacaggcaaatgaccttgaaatggaaggtgagttgagccgatataatgcttatttgaccccaaattgctgactttatcccgggaataggtgcatgcggaggatcctgtgcctgctcaacttgccatgtgattgtggatgacccggaaacctttgataaaatggaagaaccatcggacgacgagaacgacatgttggacctggctttcgggcttaccgagacctcccggctggggtgccaggtgattatgaccaaggatcttgacggaatggttgtgcgattgccgtccatgacacggaatctccaagcaagcgactttgagtcgaaataaagacactagcagagaccccgggagggactgtttttgatctggaaaaccctcacatattatccgaatagccagatggttacagcgggggtttgtggtcctattcgtcctatttggacgccgaataggactttgtactgtaatattcgtccgatgcatctggtggacttgcgcggtatcgcaaaatgaaaatctcctgtactatttttatcaaacaagactctctacataagcaatgtagacaaaatatataacaaaaaaatatcttccaacgccagaaatatgccatgggtaatcgtagatccagctcacgcctcttcgatattcaaaggctttcccttctttccattgatcaattcaaggaatccttgcttgctgacctcgttggcagccttctcccgctctcccataccaattgtgcccttcttgcgctcatccttggccgcctcctctccgcggacttgagccgcgcgcacagcattgaacagcttcacgacaccacgctgcgccatcttgcgcacccgcttctcctcctcagcgacgggaccggcaattcctcgctggatacccatcacatcacggacgcggccgcgatccatttcctctttcttctcggcgcgcattttagcccgcgcggcgttgtcgagcttctcatctgcagcctcgttgaccaacttcgcagcatacgagcttcgcgagagaacgggatcagcccgtgcggaggtaggaagtttcgtggatagaattttggagatggaggttgagaatgcggtagggtcgttgcgcttagggacagctcggccgcgattggcgcctgtgggtttgccggccggagacgagtcggaaagatcatctgcatcagaatcagacgcgtcgctttcatcgtcgtcattctcaaggtcttcgtcgtccagctcaatctcctcgccgatattggagtctgagtcgctatcgtctgattttttcggttccggtgtgggtgcttcttcttgtgtctttgccttcttcatgcggatatcgagagccgagggcttggctactgtgacacctccctcttcggcgtctgagtcttcaagactgacggggttgaaattgccatcttcttcttcgtcctcggagctgctgtgatagaagcgctgcttgacgaacttcttcttgcgaccagtgttgccctttaggccatcaaggaccttgcgttttttggaaacagcaggaggcattgtcacagaaaaatattgcgataaatgcaagcaaagaagaaagtcaagacgctgatccaaaagtgcccgtatcacaactttttttgggggcggtgagaaaccatcggctctccgattggcccctccacattgcctctctggtctctcaacgggcttcatcctcacccctccaccatcgcgaaatcattgacgactacggtcttagtctaatttattttctaattgtttacctacgcacatattcaccatggttcttcaagaccttgggcggcgaatcaactccgctgtcaatgacctgacgaggtccagtaacctcgatgagaaggtatgctatgtgtccagtgtggcccataagccagcccgctaatataacaacaggccttcgatgacatgctcaaagaaatttgcgccgctcttctttccgccgatgtcaacgtccgtctcgttggaaccctacgcaaatcgatcaaggctagcgtaaacttcgcatcgctcccagccgcagtgaacaagaagcgactgatccagaagaccgtcttcgacgagctcgtaaaattggtggacccgcgtgcagactccttccggccgaagaagggtcgctccaatgtgatcatgttcgtcggtttgcagggtgcgggtaagacaacaacgtgtacaaagctggctcggcactaccagacgcgaggattcaaaacagcgctggtttgcgcagataccttccgtgccggtgcttttgatcagctgaaacagaacgctaccaaggccaagatcccatactatggtagtctgacgcagacggatcctgctgtcgtggccgcggagggtgtggccaagtttaagaaagagcgtttcgatatcatcattgtcgataccagtggtcgccaccgacaagaggaggagctcttcacggaaatgacacaaattcagaatgctgtaacaccagatcagactattctcgtgctcgacagcacaattggtcaatctgccgaggctcagtccgctgcgttcaaggcaacggcagactttggagctattattattaccaagactgacggtcatgccgccggtggtggtgccatttccgctgtcgccgcgacgcacactcctattatcttccttggtactggtgagcacatgatggacctagagcgattcgagccccgcgcgtttgttcagaagctactaggcatgggcgatgtcgccgggctggtcgagcatgtacaggccatgacaaaggattccgcgggtgccaaggagacatacaagcacattgcggaaggtatctacactctgcgcgacttccgggagaacatcacctcaatcatgaagatgggcccgctgtctaaattgtccggcatgattcccggtctgtctaacatgacccagggtctggatgacgaggacggctcactgaagctgcgccgcatggtctacatcttcgacagcatgactgtagccgagctggatggcgacggcaagaacttcgtcgagcagcctagccgcatggtccgcatcgcgcacggcagcggaaccagcgtccgtgaagttgaggacgtgctctcccagcaccgcatgatggccggcatggccaagcgtgttggcggccagaagaagcagatgcaacaagctcagaacatgatgaagggcggaaacaagaaccagcagatggctgccatgcagaagcgcatggcgtcgatgggcggtgccggcggcggtggcatgcccggtatgcccgatatggccaagatgatgcagatgatgggaggtggcggtggcggcatgccggatatgcagagcctaatgagccaaatgggcgggttgatgggtggaatgggaggaggtggtggtggacgtggaagaggacgttaagcccgggctttgctaatcttcttgtttcatccctgcgtttttctttctcctttccatatcccaccgctggctcatcaacttagcatttgggctggtgtttggcgttttcttgctacttcgcattatatgcaacccttgtatacgagaacaaatttggtaatgagcctatcactatcacatataccatcctgaaaaaggaatcatgtccccttcttgttctaccacaattacacttttgaaacggaagtttgcagtgcggtactatcgttgtattcataataaaatcacgttgtacacataatcctgaaacagaaacgccgctaaaatccatccgtctaataagattagagaattgatacgaaaacaaagggaccgccagatcaaccatggccatgttcatggcggccaggagatcatgcaccaggcgagcccagtgagatcgaatgagaatcaacatgttatgcttttgtgttgggggatagcaaataaatcgagtcatataaatatagatgaagcccagatcgcttccccatgagaggtaggtcgagaaagacaggaaggatatgaaacaagtccgtatggtacatggagcgcccgggagaggatggggggtatgggtatcaaaagtgtccttgtagggaggaccggaaaaaaacacaaaggaaacccggacgcatgaaatccataacaaggattgcttatttttcggcgaagcgacggtcgaagtatcggagcacacccatgacgcttgcagcctcaacttccagggcagcgcggctgccagggggagcgatttcgcggggatcggggagggtgtggagcttcggcagccaggttgagatttcgtcggtggcgcgggagaagttcgggtgacgggagagggtggtaaaggcgtcagcacagctgagtgttagctctgatggcggagcgggcttgggtgcaggaggttgcgaaggcatgggggcgttgttacgcggcttgggcgcggtggcgggggcatttctcgacatgcagcatccaccgtcctttcctccgcctccgcagcagcctcctcccgatggagtgccgctcgctgaccgggaggctgccaacgtcttgcaaaaaagagtgcttcgggggtcggactggcactgggcgcaggtgcctggaccgttggcacaggaattagtcgcttggctgataggtgggagggtcacttctgagcggacgtctccctcggatggtggcggggtgaattgggagatggattgaatcggtgcgagacgattggtctcaaatgtattgatgttgcgtacacgttgctgctcctgtgcggccatttcggcgcagatgcagggagtgccgtcttggcagaacccgcagggatcaacgggaggcgaagaaacatcgttgtcgtgagactgggttggaacgctagaaaactgagcggtaaagtcgatttccatctcttccggatcgggcttgatgtggggatccctatgatctcgttccgggctgccaacgccatgaggtgagtgtctagaacgagacgactcatgggtatcaatttgcatgccaaatgcatcttcaatgcactggcagtgggcgttggagcagttgttgcaccccggaggtatactcatctggctatcttccttgttgcgttcggtacttgtaggctgaacatcctccattcgggagcttttggtcttacgaggtggcaagggaacagagtccggaacgggcgcaggcttgctgacactagggccagcgaaagatgaccggaactccttgacaagggtttcctttgcgctgcgctcgatcgatacttccttctctaaggcgtgacaccggtcgcgccaccatcccatctcttcacggcattgatcaatctcaccagagaggtttccaatttgctgttggagcgaggcgacttggatctcgtggctatcttcaatttctttcatttgctcttccagttcactaacacgggcggcccggcgctcacggaacgctcgttgagctgctcggttctgagctttgcgtttggttggcggtgtatctgtagctggcttgcgaccaggcttgggacgtggtgggattacccattctcgcgaggtgatggagccgggggtacccgggcctggagatggggctacagagggcctggcggctagcgtgggcgccggtgcgagggccagtgcagaaaccccagctggagcaggtgccatagacacactggccatcttgacaccaaattgagcttcaaatactgtttggaggtcagttgtgggcaactaatcgggcgtagtcggggcacacgcacgagccgtttctcggtcggaagagcggaagtgcgctcataagagccgataagcgaaaatgactagttggagagaaagaacgaggttcctttcaaactctgttctgtatgagataatcagactggggatggacgcatggacactcaaagagtatagaaaggttaaagagaagagagagatgcgaagggagggggaggaagccgagaaaaagcggccgatgatcagattagattatgtgctcacatgatgccggtttcggacattgagctttcggttgttatagaagttccgttcttccaaggttggctcttctttttctttttctgctgatttaccattggtctatttactatttcgctaaacctaatcctgtaaggagctcctcttttgaaatttttatctgatccgaatctgagtggagatggttccgagcaagcgttggtgggctgacgcaacatattctactgtatggagtaatataatctcttattttcttcgctaactgcgtgtaattgtttcatagacgcagctcgagcaccaattgcttgaactagaaccagcaaaggacagttgcaatggcaaaatcccgtcccaacttccaactctgcacttcataacgtactgacttcctatgcagctcaccgttctcccgcctgatcttcgatgactcaatgacaggcgacacggatcaaaattctccagtcaaagtaaaatttgttcgagtggagcgtctcgtcaatccattgaccatgggtgggcgagacgccccctacttccggttctaccagccctgtagccacttagcactacctagtagcaacggccatcgggccaatgagaacgtgccaatgcacaagggaactttcccacgagtcatccatcagcggtgagagtatggaagagtatggatcgacatgggaattggaacccgttcagccgccgttctcggtctctctgatcttatctgattgcactaacgccgctctagggtcaaccgcaatccaagggttggagtgaatatcggcaaacttatccctctttcactgccgtatctttttccctctctggatgattggttcggccttctgtggaagtggttggtggtcttggcccttgcaaatgcccccccacatagcagaatcttatcaatcagtgaacgatgctcgccaacctcattccgagcgagggccgaacagcggaactttcgtgtacatcgcccgatctggagaataccgccgccagttagtcacagctagagctgcttgtgacgtgcgtatgcagagattgacggtgggaaaagtggaatgtgtggaaagaaatcgccgccattggacacgcccagtctcggcggaaaattcaatccactattctcagttatatctttccagtgtacataaaccgacttaatgacgcagtctagtgatattctagcaaacaccagggacttccaatttgctcttgatctgctgagatgaattccaataaggattctagctaaagctaatcaatgccgggcttgttgttcgtcttcggggctctcaatctgcaagggacatgagctctacgttgatatctagaatatgtttcggttatctagtatttgattcataaaataccaatactttctggggagtcaaagaagtgagaacagaaatcacctttcctttgacgagatcaggttgaccatttgccactgaacgtttctgaggggcgggtctagtatagttatatacgtctgagcggaaattaacacagggctcattccaaattgagagctattctctccaagacattcatcaacatcgatgtaacaagcattcacaactgcgttaatcgaggagttccctctgctggaggagcagagtactgggtctccacaaagaccttctgcatgcctatctcccgcttattgaaactcgcatacaatttttccatgtcttccaaatggacacggtgggtcaccatatctagcggattgatctggtttgtctcgatgagatgcatgaggtgcttccaatacttttgaacaggagcttgtccattacccataaggtgaacacctgtctgcatcagagccccaatgttaaagtgattggtctgggagtgattgttagatacttcactcttccgaaaaccggtgaactcacaaatgcgctatagacacctgtcaccccaacatgaccgaacgggcgaacggcagtgatcatttcattcaacatctccgaagtgtccgtctccaacccaagcctctgctcaaagtaatgcgcccatcctttggcatattcacccgatgcacactctaaagcaacatcgggtccgccctcgaccatctttttcagctgtgatgtcaccgactcacctttcggtaggtcactgaagatgatcgtctcgatcctcggttctttagtcttcacgaagtccaatcgccatgcaccgtcacctccatcgataaggatgactcgactagctccatggaagaagctatactgtgcgcacatctgcccaatcggtccggctccccagatcgcaacaacatctcctttcttcacacccgtgtcgaccacacagttccatgatgttgccataacatctgagacataaagtgccttctcatctggtacatctgctggaatttgaagcaaattgacgtcgccgtacggaactcgaacatactcggcctggccacctgcaaacccacctgtgaaatgggaatagccaaacatgcctttttccaatttagtatcaatatctggaccctcagggccgggtgaaaggtcagatgcacatcggccactctgctcaacttacctgcagttcgcttcccatacaaggcattggccagagcattctcgttggttcgttcacatacagaataatactctttccgacaattcctgcaagtcccacaggcaatcggaaaagcaacaacaactctttctccgactttgacgttctttgcctctggccctacactttccacaattccacagcattcatggccgagcacgtcgcccttctgcatctcgggaatgacccctttgtccggcacatttgtgtcagtctacccggtcgctcggatgatcgtgagattattttcataccgtgatacaggtgcagatcgctaccgcaaatagtggtgcctgtgatcctgacaataacgtctccagggtcgatcacacgcggcttcggcattttcactaatcagtggtcagcaatgtacaaaagcctaacgccggcaatcgcctccctcgcttaccaactttgacttggttcttcccttgccaagtagtagcctggatcatctctcctgtctccattccatgttcattggcgtagttagacacgtcagtggtgattgtcgcattattaccacgtgggagtttcttttccagtaggtttgctgcctgggacatcgccattttcaatatattcgatgatacgtgtggttgggatatagcgagtttatgctttcactgtccatggggttcaataggaacttccggcttggttttaactactagattgcagtatatgtaaaaatgacgaaacttcctggtttgggggtttctgtcaactgacatcaccatgatgcggcatgccaggtgcagagtccatacatatgttatctatacgtacgggattttccctggcgtgtggggctttccgcttttatgagggtcagtaagaccaagctcttgggaaacatctccgcgtacgtacatagcagggcattgcttattctctgatccgaactatgtattggcaaggtcttactagcttctacttctactttacatagtcatttacgaaataaggcctctctatgtaatgtgataagtcattgggcaacatatgcagtctcagaatgataccaatgctcctaggatatattgccgcttaatggtagtgttgattttctcggacgcaaaatctcttcattggctacggacaacgaggagttgctgcagccaaaggcacataaccttgagggctccaattatcccgttgcttaccagcgtctgcgttttggttgaggtgcggcatctctttgttacgacccagagcggaccatgctaacccagatcaggaacccgtcaaagagaggattctgagcaagaatatacaaactactctgggctcgttccctcgtaagctgcattcagaggggacagacaaaacataatggctttttgcggccggccaaagtattgctgcgccgcaacaaatacaacctttccattggtcagcgtcagttgcaaaggcgatgttcaatattctcgtcggaaccaatcttccaaagtatctctgatcttcaaagactatgctgtcccaacaaatcagatgaaatgggctttcaatttgtcagagatacttaataatctacaactactcggctcaggcgggcgctttgctggaccgaaaatctcaaaagaagaagagtcgggatacgtgtgtagtgacagtttcagttctatatatatggacggcaatatcatgcggctactcgacaggtattttccccgttcactcaccaccgccgtgtcttatcctatagtctggatctatacagaaaatagcatcgatcacaacagggtgacaacaaggttctttcatcatcgcagacagctgccagaccgaataggccaagatcaatgtcggaggctccgtgaattgccgtaataactactcgggtcgcagtaattgtcaaataaaggtagggagtcctggccatggttattgtgcataacccgaagagtctctgcgatttgtccatccaactctcgttttcggaagatcgtgggttttcttttcgataagcggaggacatagaccggtactggtatcttgcattcatgggcggtttggtagtcataatcggtgttgtttagatcgaccacaaaagaggagtgcttgccggggtagattgtgaccgcagggaaacgagtcgtattattcctattgtattgatggaggccgtcctgcgcctcgctggcaaatggacgtatagattctaaataattgttcggatcaagaatactattaggagtatcacccagtattcgcatcgttcctggaacaacgtctgggggcaagtcgaacaagatctctcaaatttggcccatcgcgtggctgcgaatatgttgagttgagtcgtccatagcaaggaagaggattgatggtatgtgacaataagtggatgttgctggcctccctgtgcatatgtgaaaagatgaagtctccattgaatgtgaaggtgaagtctatcattgcttgttgagcgaaaggattaatgttcttccgtctttcccctagcaggagcatgaaggttggtcgtctcagcgactgcgagcccctacaacatgcataaggagtcagacttactagaactaatctggtagcaaatggcgtcataggacttgatttcagtgtatgcgatttgtaggaactaagcatttagctaactacggtgtagattgttgcgacgatattaacaagtatcctctcacctgcatataagtactatttgacctgtaagaaaagaacatgtagttgttgtggacagctgaatccgttatcaccggactcggcgataacccccgggggccccgtgaacggatcaggtaccagcccccgtcgggactccgccttttcccctcacgagtcattctctcctccaactcttcctcttccctacactcatacaatctactacatttacaacatgaccaggaagtacagctcgacccaaggcctcgatatgccatgggcttcacaaatgtccgcccagctgcccagtccggtcatttctgtacctgcagcacagccagtccgagctcaggaaccgatcgccgatgaacctgtccgacccgaggattactccaagccctactgcgagttcatgacatccaatcccacgatatttcacgccgttaaatccttctccaatcagctcgaagagcatggctacaagcacctctccgaacgagcggtgtggacatcggagctgaaacgaggcggcaagttctacacttcccgcaacggcagctctttgatcgctttcaacattggctccaaatatgagagcggtaacggcgtggctatcgttgctggccacgtcgatgctttgactgccaaactgaagcccgtgtccaagctaccgaacaaagcaggcttccagcagctcggcgttgccccgtacgccggtggcctcggtaatacttggtgggatcgtgatcttggtattggtggtcgcgtgctcgttcgcgatccgaagactggcaaggtggagaataagctggtcaaacttgactggcctattgcccgtgtgcctaccctcgctccccatttcggaacacctgcgaatggcccgttcaaccaggaaacccaaatggtgcctgtcatcggaattgataactctgatttgtttgaagactcgaagattgagtccagcgacatcaagttcgggacgtttacctcgacccagcctgagaagcttgtgaagatcatctccaaggagcttggcatcacagactacagcactattgtcaactgggaattggaattgtttgatactcagcccgcccaactaggaggtctggagaaggacatgatcttcgccggtcgcattgacgacaagctctgctgctatgctgcacaggaagccctcattgcttcctccgacagcacatcgaccggaaccgtgaagatggttggtatgttcgacgatgaagagattggcagtctgctccgacagggtgctcggtcgaactttatgagcagcgtcattgaacggattaccgaggccttcgcgaaggacaactacggccccaacctcctttctcagacagtggccaacagcttcttggtgtcatcagatgtcattcacgcagtgaacccgaacttcctcaatgtctacctggaaaaccacgcgccccgccttaacgttggcgtgacagtgtctgccgactctaacggacacatgactaccgacagcgttagtgagggcctcattagacgagttgccgagcgctgtgggtcaaccctgcaggtcttccagattcgcaatgactctcgcagcggtggcactattgggcccatgaccagtgcccagatcggcatgagggcgattgactgcggtattccgcagctgagcatgcacagtatccgggcgactactggcagcttggaccccggtctgggtgtcaaattgttcaagggattcttcgactactacgaagaagtcgataaggagttcgccgacttttaaattggtaattccgtgctttgctttagacagttagagccttttctcctttgtgcatccctattccaggcgtatcgtcacgttattctatgctttgggtgtgtgtattagactacaagaagtggcttcattctgtgactatatgtattgcttttccaactcttagcaataagttatctttttgattcgattgctgtacctcaacgaactatatatccaaagaatttccaaacatacatttcacattactatatttttaaaatgacataagaaaaaaaatgagtgtcccacgggtgtatccccatggggtaaatcatggcccgacaactgccaggctcaaagagcgtggtgcaacgttgacgaggaccaaaaaacaaatctgacgggtatatcacatcatactccaagccaccaatgtgactgcatgagccattcaaaaaccaaatacgtgtctataaatcagaccttcaaaacggcaccgccaaatccgcaggcaaaggacgaggatgcgtcagcgtattgggccgactcagaggccgaggagccgagataatccctgtcaatttcttatcttcctctctcgtccagcgcttaatgctagatctgaagctggtcctaggaacaagagcgagaacgcgctccgggtcaccggcgccatactcgtgttcttcgccgggtgcgccgagggttgatgcatcacagttccagtcggagttgcgccgggttgtatcgccgcgggcggggcggctggcattgaaggtcgatatcatgcctgggaatatacgggcgacgaggggttttagggttggtaagcaggcgcatattatgcctgtgttgcattctatggcggaccaggaggcggcgccgacgttgtcgtctagtttgtggggttagcttggtttttgggatgatagggctgagcggtacgatacgtacaggtgggatcggatgattcggcgatttgtttcaggctgactagacggatgatactggtgacgcagacactagtggatgttatgttagtcgtgggaaaagatgatgtttggaacagggtaactcacaagccacccagggcgaacatgatcattaaagcgaccttttgttttcgaggtaagtcgactgccattagagccgggatgggaatgatcaggatagcaacatcggttgagatatgcatactagcattggagaaccacaggttggtcttgttcaaacagaaaccttgtattgaatcgtcccagaatttggccacgggaatgcagttgaggaatgcactgatcaccgcccatgtgccatagacggcgaggatggtgatcatgatccaacatacgacgcgcatgcggtgcgttgggaagactcgaaagtactgcatcagaattgaggctttggcgcagaggacggcggcgttgtagaaaggaatggtgagccagaaggcctattcggattgtttgttagatgcagttgacagctaatgacccggcttagggcaagctcaccttcatctgtctctcgaaaatgtttggtgggatatctttgaaatgcactcccatgccactgacggcttcgataatgtcgaggcccatgaagacatatgaattcacctatacatctgcatcagtatctggagtcctttgatatcagtaccaatcaaccaacccaccagtgcgataataaccatccagtcatttgcttccactcggttcataagtttcatacgagtatacatcctcatcatcacgaagcaggttgccaagaccgtgaacacaacgcttataatcaagccctgctcgcctcgggaggacataagtatgccgtcatcatctcgcctgaagatcgcatctcgaatgtacaatagattcattgtcacgcgatcctgtggcttcaggaaaacaaaggaatggctactcctcaaagagaagattgcccggaggacagcctaacgatccgatcaataagacgatcctgatctgattaacgattaagatagggcacaaaggagcggtaagagaacaacctctccaccaagaggtgaaaaatcaaagaggatatcgctctattataatccaaagcgcataaagctgatgcgcagcgtcgccataaacaaccttatgcagccccagaaaccaaacggcctaggaaagaatccactatccctttttgagagagacacttaaaggacagccattgtatctctcctcgctcctcggatgtacgggcaagtgcttctgacgcaagacagcatccccgtctgggaagcgtgtttgcagcagcatgcagcgcaaggggcgcatacaacgaatcgggtccagcgttggccccgatggactcgatatgtacatctgtactctgtattaattacaacactatgatatttctttgctgtatttccaatttctcttctttcccttttcttccctccttgaacctggtggctgcagtttacacgggaacaaattatagtttgcagggtcttttgatatatcaatttcccacaccttattttgagaccacagaaacatttaccccttccgtctcactggctctgaatggcaataatttcaatttactcctgtcgatcgtccatagacaatcccctctaccaatcagatcgagactacactacgtataggctattcttgctttctaatttgacgcgcgacagactatacttccacggattatcattcggttccaagttgctgggatgctatgttatgtgctacgtacatatataatagttgaagcaattccaaatcactttgaatatgacatgatgcaatatttgcatccggtgtttgcttgcagataggtcggaggtcatctcatttgagattcgatcatctccgaaggtgacactgaagaagcatgtataacaactgacgataacgagcggggcctgagactgcgctgtcccggagccagctagccctaactgcccatggaatctctcactgcagttggcctacatgtggaaagctgctcggcctcagggaccaatgtaagcttaaatttgtcagacctattggttactggctcctaaatcgtggtcatgtgcgccactttaggttaaaagccagcccccagtcccgacacggtggaaactgccaggcaatcacgaagatgatcagtaaaagccagggactcaaagaaatcagcacaaccttcgtatgaataccctatacagaagttgatcaacttttgtcgacttatacccctctcgttctgcagcactatctcgttaccttggagattggaggaatggttagaagaaggtttcgtctgtcttaatagttgaccgagaaacgaacaacccaatgtagacactgtcttattttgcatgttagggcaatattaagctcatcttgatgtgtaaggggcgctccatttattgccactaaactactccgtatgtaacagatctacccgcagctagaatagcagagtgttcaattaaatattgaatcgaaatgcgggggagagagagtaaatctcctatttgttggaacatccagccacctcattcgataatagcggaggtcttgtaagggatgaccatctacgattgacgcggatatccgctcccgaaaagcttcgtttgctactaatatcaggatctgttcagttcatgcgacctactaattggatattgttaatgtttctcatacgaagaccgtcggtctcaggatgatcttgtggccttgactagtcgcgtcccacaacatccaaagctgctaaccacgcaatccaactcgtggcaatgtgtcgagttttgggaaggattcaagaaaaagcaattaatacgttacgcaatttggacttttcgccaacggcatgtggccaaacaagacccctgccaaggtggtgttgggtagttgacgtgtcacatacgatcattagggctagatattcgtctgggcacagacatcggtacagtaacttccctctgtcaaagcatggaagaacatggctttgcatttctactgccaaaatttgaatcctgtagtggaacgctcatatacgcaatacatcttgttaatatgtagggcgttaggttcttgacttgcgttgcatgcaggttgccttgcttgccgagttgtcatggcagcttgggacttgaatcttgcattaatataaaataaaatatagtttctagtctaatttgaggacttgtaattgatgcgtagaacattgtcgatctgctaaccaggagctaactggagctataaaacggttgcaaagtactttgtcgcaattttgagcaattcgatacgccaagacggctctatacctatctctcgattaacaatgtcatgggatagggtgcatctccttaccacctcttcatctctggtcattcatcttactgcagctagtcggattcaaattaggatctgggcagcttaattggactagattccgcgtgtgttgaccactgtctctcgtggttctgagtctacagcctcttatacgggatagtattgcacatttcttgtgctcaaatagcttggtaggaatctgtcaaattgacacctaggcaacttcttgcataccatagaccgaaaatcttcttcagttactgtgggctgtgcaagctacttggcaagatgtcagctccctgttctaaatcaagccactgctggttaaaatgagaagtaatcgtatttccttacagtctgcagcaactctctttgccgttgtctgatttttgatttctctttttccacaaggaccttccggattttggttgagtctgcaggttgaaacatgcaacgtccctattatagggaatattaaatctccacagagagacgtatataatttgaagtaataatcttggaacttagattgattagaagctgtttgcatagaaccatcggacatggtttctttgttgtaactttgatttaactaccctgctgcaagagaagaacgaattggcttggccttcaaagctattttgtgcttactttttggagatactatactatttacacagcctggggaggaatcggcaaccaattggcctggtttccaacatgtgctggtctcaagctggcggtaactgggcattccccgattgaagaaaggaagaaatcctgcttctgctaagacatagaaggatctgtttctagatcttaacctccgttatgccacgagatctcgtcattgaatcaaaattgtgttggcgtatctcaagtctcgtggaaaatcgcttggcaacatcagaattttggtctccgttttaactggcctgccttcaactgaagatggaatgtttgatactatgatctgagtcccaaataactagagaatgaatgtattgtccaattgcttgttacagacgaaagtgccgtagatttggataggcgataagatagaccgataaggacgcacaggccaccgttcacagagaaatttcatttccacaactcggccaattctttcaagtcgccaacgatatcctcttttctcattgtcgatcggtggaaatagtcctcatacacaggacaaaatggcaggcactactgccgaatccaccaaggccgtccatacaatcgtgctggacgctggcccaattctcaagaataccccgccgctttcaaccctccttgcccagtgcgacgagattatcaccaccccctccgtggtggctgagatccgcgatccagatgcccgcgcacgtgtcgagaccctatacctgcctttcttgaagcagcgatcccccacacccaagagcttcaatatcatcagcgaatttgctcgcaagaccggtgaccgttctgttctcagtagaacagatattgaggtcctcgcccttgcgtacgaaattgagtgcgaaaagaatgaaggagattggcggttaagaagcgttcctggccagaagagaatcaatggaaagccacctgtcaaggaggaatccgaggaggctaagcccgaggatgcggaggtagaagccatcacagatggagtcaaggagactacagtcgcagacatccaggaagagattccaaaggaggaagaaaccgctgcagcgaacgaggctgatgaagtcgccgagattgcggccgtgatcgtcgaagaagaagacgaggacgaagatcaggatgcagaggatgatgctgacgacggagaatggatcacaccctctaactataaaaagcgtcttgctgaggatgagtcgggaacatcgactcttaccgctgcgcccaagacaatgcaggttgcgactatgactactgatttcgccgtaagtacatcccacacaacatctgtctattgcccaattgcttattctgtatagtgtcaaaacgttctcctgcaaatgaacctcaaccttctatctaccaccaccctccagaagatccagcatctcagaaccttcatcaagcgttgccacgcttgcttcctgaccacaaaggagatgaacaagcagttctgtcctcgctgtggcaaggatactctcactcgtgtctcatgcaccaccactgccaacggcgcattcacaatgcacctgaagaagaacatgcagtggaacaagcgcggcaatgtatacagcgttcccaagccaattgcaggcagctcgaacggcaagtggaagggcggcggtggccagcgaggatggggcaccgagctcgtccttgccgaagatcagaaggagtatgtccgcgccaaccaggaagaagagcggcggcagcgtcgcgagcgtgatctcatggaccaagactacctgcccggtatcttgaccggtgagcgcaacagggctggtggccgtaccaaggtcggtgctggccgcaatgtcaactcgaagaagcgctaaatgtgctgcgtgtatgattttgcatcttgattatatgggctggagttttggggcatggaaagaaaaagttcacttggtcaataccgctgtcatagtggttgtcggcctttttatgaggaatgaccatgtcttgtgatttacggttgaacatagaatatatagccaatccatagggctctttatgaacattttaacaaaatctttgttgattacctagatcaggtataatattctctagaatgtctagatgaagcctcggataggttatccaaggacagcaaaacaagtatggacatctcagccatccgttgaccacaagaaaaacaccattcgccaaaacatgggctataccacccggtaattcattttccccagtatcgatcaatttaagccttgacaggagtgtctggacaatagcatattagtttgcagttctgcgaaggcgtaattcttgaagaagacgtaccgggctgctgggtgaggagaaggttgtaacgcttcttcagggtgacacggtgactgagaaagaggttagtttccatgcttcaattgtgcaccatgcagaacaaatagctacttaccgagagtacttgtcatcgggggagaagcgagcggggtgggcagacttggtgacctcgccgttcatgacctatgattgccaaaaattagaatcattggccaaagttaaacagtggccgaggagccaaatgtgcgcgcggcagtctcctcggcgcaaagatttccgtaccttcttcaaggtgtaaacacgcttgccagcgggatcgagggtgtactgttcgtcacaaaattagtggccgatctccgaacggagctgaagattcgctcgcttcgatcgcttcgaagtcgcaatgagacataccataagatgcattctgaagagagcgatattagtacatgagaaatgaagaccacttggaacacgaatcgtcaacttacttgacggtattgatgaattgtcctgtgttagtacttgcgtcggcgataagtggaggaatttttttctcgacgatgaagagctcggaccaccctgcttagtcacggggtgctttttaaacggagctttcgaccgcaaaatttcctttttctctcgcacttgagcagaaaagagaataatctctctagaattacccttgagctctgttaatgtacagagccatggttattctttactaattggcacttgattcaggttgttcatacatacagagacttctaggtaagatgatcctcagctcttctacactctccagcacatccttcaccttcggtgatgacaccatttatttagcccaggcaggcggcacttttgatttctagttgcctgtcgatgatccgctgaattgactacaacggtatctgagaagatattaccatgacgattgattcactcgcatgtttcggcacagttcgctaacctcgaattttgtgtttagtgctttgaatattatcttccagtagcggtttccaggatggccactccagtaaccagcgtggacaagcctgtggctatcgagtcagggcctgcatcagatgcacgtccgcctcgtgcacctcgacctcctaggccaaacttcagacagattcaccagtttcctcttccggtcaatgtacatcatgttcctcctgtaattcctcataaccctctttctcttataagtgttgttctctcgtacctcacattccttatctccccgcctcgtcaagaagtctactcggcctacttcgacaaagccacctcctctatccatgtcacggatgagaggtccattaatgccttatggcagatgggatttttcggcaagggtagtctcagtcgaagtgaacccagctggctggcgcgagagaaaaaacgaagagggttacataatgggaagaccagcgaggaaatgacaagactgcgacgaacagaacgtcgtgaactgaagctagagcgtgcccggatggagaagctggccattgaagaaagactgaaggcggaggcggctgctagggaatctgctccttctgagcctcttgaccaaggtctccaatcaacacccaccgacgatacgactaatggcacagcggctacaacggagaagttctccttgaagaaggcaaaagaagcacgcgcgctggaggcacggcaggcgcgggaattggctgcgcaaaatgagactcttgctgaacaaaaccaacgcgagacttcgtctaacagcaaatccgtgcgcttctcacccatcgtacaaaagaaagaattcctatccaactcgccctcgtcactacagttgcctgactccgtcgtcgacagcctcgatttagatgactttgcaaatgaggagcatcttcaactctccaatgaagaggcgttcttccttgtctactcgcttggagcattgcaaatctacgattcacccttgaaatccggggaagcccaaccaacctcgccaaccaccacccctgccctcctccgacagttctgccaccactccttccaacccgctcgtgacggctccgcatccctccaacctgatgatcccttcctgatctcctacgccgtctaccaccacttccggtccctcgggtgggttatccgctccggtgtcaaattcggaaccgattacctgctctacaaccgcggaccggtcttctcccacgccgagttcgcagtcatcgtcattccttcctacaatcacccatactggtccgaaacggaagaacggaagaactacacagcagagaagcaggcgaggagttggtggtggatgcactgcgtcagccgtgtacaggcccaggtgttgaagagcttggtcgtctgctatgtcgaagttcctccgccagctgcttcggttgatgatattggggcgctgtttggtcaatacaaggtgcgcgagttcctcgtcaagagatggattccgaaccgcactcgtgattgattgtcttagtttcttcttgggtttgtcccgtcaaggctggggatgtttagggcttcagataccctctctgtaaatatgctgtattgtccatgacttcacaaatgtattatgattgcataatgacccatgaaattatgtctcatcctagattatttccaagacaattagtaaattatttagttcaaataatcagagcacagtgccattgagagtgagtgtctatggtactctctcatggcgctagtctataaatggtaatattacttcaagacacgtgatacgcgtttcgcgttctgacgcctccatttgcatttgcatttatgtaacgcattcgaagtgtcaagctgcgttaaaacaaaatatacggatacagcttcccgtatcaagacatactagacttccctgaccgtatgtcgtcaaaatggaaacccaggacgatagcatcgaccttgcaaagttgcaacgcgacgcgttggggctagtatgtaacgaccctgcagcgtccctctcattggactaactccgacatccccaggagcacgatccgtacctttccagatctacacaaaaaggtaacgagccgaatcacactctttgttacacatcccacaaagtcaacggtgcttccaatggtgacggagtgtgcaacggccaacagttacctccgaaaacaccatcaaacccagcgagccttgtgcaccaataccgaccctctttgtatcgacctcgtcagcatgaaccacgcacaatgatgttcaataaaagtggcaatgaaccgggcatcgtaccaggatcgcaattcggcaacatgagctccgctcctggggatacccaggtcatctctcagtcagtgtacgacaagattatcagacaaaatggggagtccatgcaacaagattatacacaaacgggagccgatggagcgacattgagaacactgtatgagggggacagtggccatatcgacctgctttccgaactggacaccgtgcaccacggaacgaacctctcccaagatgacgatgacaacgacgacgggagcaattccgatccgaacgagtcttctccaatggcttatgcacccgatttattccccgaatcgcaacgattcctagcagaaacacccggaacagtggtgaaaaaaaatgaggcgggtgggacagcagagaccccgagcatctcgcggaatcccctggctagtggcatcgagtcaagtggtgggcttcttgggctgagccaggttttcggagctacccaggccccgtcgtctcccattgtccacggcctgcagacggagcttgtatcggatcgcccgtcgcccaatatcccaattcaatccgctcgtgttgtcaatggtatctcgtcgcctttgatgggcttgccggttcagttcacgagagactcatccgaaccgaatatgaactatatatcgatgaaggaatcgcagaaaaggcgcgataagactttgggggagaggttgactcggtcggccgacaatatccagtcggaccagagtgacaaggaattctataaagagtcgagctttatagaacgtgcacgacgacagcgagagattgacgaggaagctgcggctcaattcgccgggttgagtgctcctgccagatctacatccaatctctccgccagactacggactccctccgagcagcccggtgaacaacaagaccaggaaatgatagaagctgttgccagcgaggaagaaaccgaacaagaggaagatatgcaagtgcccaggtcacaagagcctcctcaatcttcagccgaagaagataaagagaactacgaggggcctccaatggatactgctgctgccgccgccgccgctgccagtgcccacgatcgactatctcaggtacttgggtttgagccgattctctccccatctcgcatgcgagtagacgagcaaccggatgatggcatagctcatggaggctctggtagtcagccgaacggtgctacaagttcttcccaggccatggtgaaagactctcaaccatcacctcagtcatcggcaaagctcatagaacccgaaattactaggaaaattactcatcggtcgccttcgcgttcgcatatgaattctcctactcgagaccttccctcctctccctgctcgcgaccacaatcaagacattcgaacagccatactcagagaaatggctccgtatcaaatgaatatgccatccaacatgttcagactactgctcttaacgagaatataccaacatactctagcaacccctcggagcagcaacatctaaactcatcgcattccagggtggaagcgggaacttcgggcaactcatcatcgatgccatcccgtgtggctgagacacctatgaatcaacgtcttaagcatctcggtgacatggctcgattgacgagtatcccagaaacaagtcccagtcactcccagtgcaattccgtggctgggtccaatggtgatggactcaataatgaagacgacgatcttccacctatgttgttcaatgaagtccccagtattcgaaataatcatatccgcccagccggggcaagggcactctcttcgcctctcaaaaagctgttgtccagtccgggcggaggccaacgcagggctttgacagaaattgcgggagatctttccccgcaggtcggggctggaggatttgatatgggtattggaattttcactgctgaggatcgagaattcaaagccctgatcgatggatcgccgactcgaccgaagaaaaaacggcgtggcaacgatggctcgagttacattgcctccgaccctatcatacctttcacccctcgcacacagcccccaaaatccgttgcacctattcgagcaacacaagaacgaccggctcccattcctgaagttccagattcggatgatgtgcctttagtgcaactccccgaaaaagccgtacgaaggcaatcaaagcccccgcgacgagcccctgagaatgtttgggaaatcgagagatcgcctgagcagcccttccgccagagatcaagaattggcaagacttctacctcgatgtctacgcaagggaagtatgtctcagaaaagagatcagtacccccaccaaaggttgtcgttcatagtcgaccaccacctccatcgtcagagctcactgaggtttcatcaacaattgcctcggatgatataattgagtcagaggcgtacagtgtcgatgactcgccgactacgcctcgaccatctcacaccttatcggaaaacaccgtggtcgctccaagtcaggttctttctgtctggatgggtcagaaacgcgcatactatccagcgacatgctttgggacaccgctaggtgtatcacaggttaaatactctgtgaggtttgaggacagtcttcctattgaggtaccgaagggtgccgttaagagatttgagcttcgcgtcggagacgctgtcaagatcgagatggataatattccaaaggtcactcatgtcgttcggggattcgacgacaagcttactaaagaagagttggctaaagccgctgacgatggcctctatcctataaccgacatttacggtcataccactatcatagtcggtcccaagcaacgcaaaagtctgccaaatggagggatgggcaacggcgagaatgtgattaaagtacctatatctcgtgtctatcttgatactatcctgtggaatcaactgaaagatcgcgcgttcacatatcgcccggcgcctgttcaacaagagagcatggtccataccccatccgaaaggtcatccgcgcctgcttcacccagttgtcgcttgtcccgcagccttcaccaaggtagcggaatctttgctggtatggtgtttgccgtatcttacagggaggatgaagcatccaaaaatcgtgtgaccaggttaatcgtcgacaatggcggcactgtattacatgatggatttactgagttattcgagccttcaacaattgtttctgttgatactcccatcaaaggtggagccaaggatgcaggtatcaatagcaagggtctccgacttacagctcttgctgaggaagtcggctttgcttgtttaattgccgatacctattctcggcgagaaaaatacatgcaagcactggcattgaacctcccatgcctgtccgggcggtgggtagaggactgcatcgcccaaggtcgcgtccttgactgggatatctacctcctcccagccggcgactcaatgtacctcaatggagcgacaaaatctagagtcatggctcccaaccctccatccacagcccgcctcaccgaaaccatctccgcacgaaaaaagttgctcgcagggcaatcggtgctcgttgtcatgggccgtgggaaggtcgaggaaaagaggaaagcctacatcttcctgacttacgccctaggggcttcccgggttgagcgtgttcctgatctcggcacggccagcgcattaatagactcgcagtctgatgccggtctgtcgacggactgggactggatctatgttgacgatgcagatcaagctgctgcaaagtcgatgttgacacccaaaccgcagacgccgagaattcacttgttccatgggaagaagcgtaagaggtcgattgcatcgtccactcctacaccccctaatgagccaaaatgtaccgcgagggttgtcggtaatgagtttgtttgccaaagtttgattttaggtcgcttgtttgaggagtgattccttatcttagctattgataccatagtatatcgtatctagtctttaatggaactatttagactcacatttacctacaaataaatgtattcaaaatcaacaggacgaaactcatttggtatctctattctcgaaggaagccaatacaacgttatttgagtaatcagcgagtcataccaggagtggtctctgtggtgtcagatagccgctcagtagcagggataggctccgggatacctggctcacgagaggtatcgtgcatgtctccaactgccggctctttgcctttgagtgatcgttgactcggctctacagccaaatcatgctcggctgtagatataggctctggtgcatttgacgtaggtgcatcgtgggtgttggatatttcagggtctccagctgcttcctctgtagctagctcagtgcctggcttactttcagtagccggtgttgtctcctgatcttctcgctcaggggatacactttgggaatctccgacgggtggttccgctgttccaggtgtctgctctgcgcttgactcgacagctgctaactgattatccccagacgccaagataccctgtgattgcccgtcgggtggttgcatagaagcctggggattttgttcgcccgactgctcgatgccctccggggctggttccacaggtccttcgacacggaagaagtccccgttcaaaaccttgatgagggcttccgcttcaggtggtggtggaatcgatccgctcagcagctcctttgctcggatttcccgcccatacaactttttgtttgcatctgctcgctctccaagaacaccaccctcgactgtaagaccgccgtataatccacgggtcttagagtaggcgaacaccccagttgcgcccttcgtacccactactcccccagcctcggcactacgaccaataggcccgacggccatagatatattcccaccaagagtcaagtttcccgcctgcatgaatgtcttcactgctgcatcggtagtcagaacgaacacgaaatcggtcaattctgcgccaaattgaccaccggcgccgacgccgcccattgccatggctgacggggcggaccaactgccatctgggagacgggcgacaatcagtcccgagccaaagcgtattgagcccaggaatccaagtctgagcgctgtgaagacggcgattccctagcatagaatgagtcgggtctgtttgggtcgtttcacggtaggatatctcttaccttggctcctacgaatatcttacgtgggatttttccatcgatcttgagtttcgggttggtgaaggattcgagaatcgcagcggcctttttgcactcgcctgtggaacatggtcagcctagagtcagctatgtggggtagcagtagcacggaggatgatactagatagtgaggcaggcaacgggctgtgcaacgggttcttcatggcatgtatcttttctctcgctttgtgatgtgctttgcaacaagatgtctacgtctacgcaaatttaagtgatgttgttctcacaaggtcgtatatcaggggttggcgtttaacttaaattgcgcacggacgtttcacgaggttggtatacttcgcgattgtacggagttacaggagtggacatggagtttcacaggttcatcggatttctaagtaattctatgcataatttagaggttcacacctctatctggcaaaatgttagctatgttacactgaattgattcggaagaatgaaactgccaagtatcaagggcctcgtatgatgaaacatgtagcgagatatatctattatgttacctaacccatatccaatgacccagagacatagtcatagtggaatcacgaatcccaatgtttatgtgcggcttgatgaattacaaattatgtagtttgcttggtagatcatccagggagggtttatgcaagatatagtttcatatcacgcgtcgaaagtaggtagctgcggtgagaatataatattctcggaggaactatcgcactctctatgatctatctacacatgtaatgtaacattgaaattgaggcgaatcaggaataaagttcgtccagagcatccatggataaggctgacgggccgcggttatgcttaattttcgagccagctgcacttagggcttacctagggaaaggggtacccggccaacgggtttgggccgtgcatttggccggttaagccgggccgtaattacctcaatactattatgaaacccaaatacaatgtctcaaggctggaagatcttcggaaataagcctactctagtgcaacagttgcaatagtcctgctgagagttgtacatatcggctccatttcgctacaacatacacatcttgcctcaagtccccagcggttggaccattattcccgatgctgttccagaccactctagtacttctcgtacttcagacgactagcgtggcatctgtgtccttgaggcgaggagcgattcccctcaccgttaaaacattcgattatgtggtcgttggtggtggtaccgctggaagcgtgatggcgacgcgattagcacagaacgacttcgaagtcgccttgatcgaagctgggggacactacgagcttgagtccctggcggagtttcctgcagcggatgcgttgtcgatgggatcagatcccactttcagctcaccagaggattggggctttgtggcaagagatcaatcgggtgccaacgggcggtcgattcatttcgcccgaggaaaatgccttgggggatcgtaggtatctctttccaagtctagcatatcagatcaaaactaatttctttgcaggtcagcgttgaatttcatggtttaccaacggtaaagccccatgaaaactaaatgcttaggctggaataaccggacatgcagtccaacacgcgaatctatggacgtatgggcaactacagtcaacgacagcagttacgaattcgacgaagtactctcattctataagaagagtgttcagttctcgcccccaaataccgactatagggttcagaatgcttccgccgacttcgatgtcgatgcctacgactcggatggtggcccattgcaggtgtcgtatgctaactttgccgagcctttttcgtcatggatgagcctcggtatggaagctatcggcattgatcaggcaaaggactttgtccagggtaatataatgggagcccagtattgcgcatcaaccattgacccagccaacgagctccgaagcagctccgagcaatctttcctatccaagatcaggcccaaatcactgaccacctatacaaatactcttgccaagaaggtggtctttgatgaaaataatagagcaacaggagttcaagtgaaaggattgctgggtgatcttgtcgtcatttcggcatcggaggaggttatcatctctgccggtgcctttcagtccccccagctccttatggtgtctggcattggccccatcgctcatttagaagagcatggaatcgacgttatagccgatcgaccaggggttggtcagaacatgtgggatcaccccttctttgctccttcttaccgggtgcgagtgacaacattcactaaatttgctactgacctgatgtacgcggctggccaaattgccaaaatgttactcaacaaaaaaggagtcgtcacaaatccaatcgcagatttcctggcctgggagaagattcctcgattcttgagcgaggaattctccgaggaaacgaagagtaaactggccaattttccatccgactggcctgaagcagaggtgagagacattctatcagatatagagaaaggctgctaacacggagattcctagtacatgtctggtgcagggtatatgggcaacgtgtcaaacctcctggcaatacagccaaaagatggatatcagtacgcctcgatactcggtgttctgattacacccatgtcccgaggaaatgtcaccttgaagtccgcagacacctcagatctaccagtgattaatcccaattggctcgatgatgaggctgatcaggaagttgcaattgccatgttcaagcgaatacgccaggctttccagagtgaagctatgcagcccgtggtcattggcgaggagtacaaccccgggccccatgtccattctgatgatcaggtcctcgagtttatcaagaataatgtgatgaccctgtggcatccgagttgtacttgcaagatgggaacttccgacgatgatatggccgtggttgattcccaggctcgggtttatggagtggatggactgcgcgtagttgacgctagcatatttcctttccttcctcctggtcatcctcagtcgacggtttgtaggtttctctcagtactgctctgatttgttctccagtgctaaccgtgtcacagacatgcttgccgagaagatcgcagcggaaattattcgggattcctaagcgccctaaaacagtttcagaggttaacacaaatattatccgatgacttgcgacgtctcgttataaattgatatgtagataataaataagcctgttttttggtcttcctgggttgtgcttacccaaccctggaagcgatgccatgaaacatgggcttgaacatggcaattgtgcccgtatctctaaaagagaggaagaaataaggaattgggaaagttgatgggtaaatgctcttcctataatacagtaaacaccagatacaatcctcatatcgctacagaaacccataagttattggaacaagacatcatgcacacggaaaatgccctcatttcttggctgtcttcttcttgcccttcaaactcttcagctgagcagcccgttcggctctctgctgacgcttcctccacgccaaccaacggttaccacgatcatgggccatagctgtgatgccggccttctcagcggcccgaccaatttcccaattagcctcacggtacatgtaaccggggcggagctgggggccagactcggcttccacagccgcgacatccgtcacacggacaccgctctcatcaacagaagcaacgagatcagactgagccacaacgcgttccgttatcggcacaggtgccatattcagcttgcgtcggctgggtgcattgcgagggtgcggaagctgctcatccttgtcaaaaacgactccgatataccggcgcttcgagtgcttcagtgggtcgaggtagtagcgcacgtagccggactgtgttgcatagatcgtgtggtcccgtcccattccgcagttctcaccgggaaaccatagcgagccacgctgccggaaaatgatgcatcctgttaccacgtactcgccgcccgagcgcttcgctccgagacgcttaccggccggatcacgggagtgttgattggccgttccttgggaggcgtgtgaggcgtaacgcacttgtgtgaatgggaggagtgcgcgggagagggagggtgttggtgtggttttcgggaatgtggatgttgcggagagagtgcgcaggagggattgcgattgcgagagcgtcggtgtcgaccggattgtcggggtgaaggctcgctccagtgcccgcaggggcgttagcactcgcggcttgaacatggtgggtaattggattgtttggaggtgtagatcgtgaagctccaaaggggaagtttttcgttcggagatcaggcttggcgtcacgtgtgtacccgtaaactggcttcatctatacaccatgcgaactcgttctattttctatacgaatacccgttcattctgctattagtgtcgctgtgatttttgaactatgttgcagagctggcgccaagccatttgggctcttctccttcttgtctctgtcgctcaggcccaattcaacttcttcgaccagatgttcggaggcggcgagcagcaacagcgtcaacaacagcggtcgcagaacgctcccagtgacagtgatcggtaccagcagatgtggaatggaggtaagaatcaaatatctgattgtcgagaacatgccgtcgaaattgcacttgccctcgtgaccacataactgactctttccttacagcacaatgcgaccactacctctgccccggaactcttgcttgtgtccacttcccacaccactgcccatgccctcaccctggtgtcgaggagaaggtcgaacttggagaaggaagtgctatttgtgtgtcgaagggaggattcaaggcgggcgaagctgcgcggaaaattgaattggctcgcaagggtcttttgtgaaaaattcggtctattatctttatgttatcatgtgaatcatgtgcagctgccgatgggttgtgaggtcaagccatggagtttggtgccgctggacggattagtccgataggattgccatgaatctttttggatatgcccagacgtgctcaaaatcggaaagccgacgctgtatatggaaaagaatgcctatattctcatatataacctgataattctacctaacacatgtcaacgagtctactatgtatatgtagacaaggccacttgagatgcgatttctcacgtctggccgagcactcctcggtaatactcataagtagtagagcatggagtaatagattagccagaagactagctgaatatcttgaaaatgaaccgccgtgatctaaatgagggtagtatgaagtacaaccgttataaacgatgtgccgttgctatctccgattatctccgcagtgaccttccgtcatcggtgtttcagcctctcggcgatggagttactacttaccaactttcatcccatcaaccttttgcctcaatctttgtctgtaagataatctggtctttctcggttaatatgtggggttcaaggctccaactcctgcaaaaacagtggacaccagctcgaactcgagctttttcgagcttcagaagtcatggatctcggcgcggtcctcgcaatagcataagaagaccgaatctcatacagacttcgaggaaagcggagccctcacataagaatgagcctgctacttctgagtcccaaggtggcacaagtcccaattatgacccatcgcaaaacactctactttctcccgtttacgtgcctgaagatcccacaggtgtgcttaaagaaacccatccagcagtttcaatactggcgaactcaggaatagtcgtacaacgagaactagagatgatgaatgttctgatgtaagtgcgcaagtgctcatatgcgagaaacatgtgtactgactccttcagtggatttgaacaagcgaataaatatgtcatcatggatgcgcagggaaatcacattggatatatggcagaacaggacaagggattggtgaatacactggcacggcaatggttccgcacccatcgaagttttgtgacacatgtatttgaccgacaacaaaatgaagttcttcgagtaagttcatggaatggccgtcttatagcacttgactgatctagcagttcaatcgcccgttctcttggatcaactcctatatccatgtctataaccctcttgatcaaacgccaaatgcttactcggcgtccacctctcttcaaggcacagcacccggtgctctcattcaacctggcaacttatcgagtgcaaggatatccccacttgatctcggtcaaatgcgagttatcggcgaagcccagcagcagtgggcacctttacggcgaaagtacaatcttttcactcatcagcagtccccaaactcggaaacagacatgggaacccgtaatttctcgctatctgattctggcttatcacgagcacagcagatgcaactgatacgaacacccgaccaacagcagggtcaattcaaccaatttgcctacgttgatgagccctttctatcatgggatttctctctgaaatcagcggacgatcagttaattggatccgtcaatcgaaattttgcaggctttgctcgcgaaatctttacagacaccggtgtctacgcaatgcgaatggattccgcagctctcggcacagaaacatcccacgacaagaagactttgggcatgaccctcgaccaacgtgctgttatgttggctacagctgtaagcattgatttcgattacttcagccgccaccaacgcggccttggtatatttgacttcccgccatatgggttcaatatgggcggccaggcccccgctgaaggtgcagctgcagaaggcgccaccgccggtgaagcaggggccgttggtggagtcgctccagggactcttgagcgagccagaaccgctggcgatgtgccaaatggtatggtttcaggtgctaccaccgcgggtgcaatggctgggtatgaagcgatgcagagggccaacacaaccgacccaaatgccccagcatcggagccggtggacccggcgtcacaaggcttcgaggatcaacctcaagatccttggggtaaggatagtccttggggtgaggaggattcttggggggagaatgacttttggggtgatgatagttcttggggtgacggaggaggtgaatgatgggattgttttgaccggtgatgagggccagtttttgtactataatattcactattagatgcagtagttgttctttaactagacttttgccgttcacctggacattttcccgtcaccctaagaaataggttccccatggcattgccatgccttgtccaccgccccggaattattccatccccactttcattccacccaagtcccccccccgcagatacctcaccacctaagtatttcgaattgcagttttaattcaatcaattaaacagcagagatggcgtcctccgtcgcccagaagcgccttttccacgaatacaagaacctctccaccaacccaccagagggtatcactgcaggccccatctccgaggatgacatgttccattgggaagccctgatccagggccccgaggaaacccccttcgagggcggcgttttcgcagcggagctgaagttcccgcgagactaccccctgagcccgccgactatgaagttcattggaggtggcgtgtggcacccgaacggtacgtaaccgagacaacccaggcgcctggctacttgctcgctttctcaatacacaatggcaaacatcttactggaatttgaattacagtctatcctaacggaaccgtttgcatctccatccttcatccccccggcgatgacccaaaccactacgaacacgcatcggagcgctggtcgcccatccagagcgtggagaagatcctcatctccgttatgagcatgcttgccgagcccaatgacgagagcccggccaacgtcgaggctgctaagatgtggcgcgagcggagacctgagtacgagcagaaggtcagggacgaggtgaagaagggactgggtctgtgagccgggctaggttgcggatcaatgcctcggttttctcgttgctgcgcaggtggatatttgtcaacatggtctgcttgtgctgcgcgggagtcaagatttgatgactggcgttcaagggttcatctttccttatttgcatggcttggatatgcgatggcttttcggtctgtacagtgcattcttatcctcgcattatgatagcggatgaaatacatgcagttctttcgattcactgttctcttctcttgcaactacttgctaaatcttgcatttgctttgggtttctactactacatggcaggtactatggtatatcgtccctgtctttatcttatcacatctattccttcctagatatacagatcgtacagcatcttactcctgccgaaacatcctccgattaatccattcctccaaccccccttggcacccatacaagatctcaatctccgccttcagattcaaaatcagcatccgctgcaattcaacacgccactctggctccggtccatcgctcgcccagacaggactgttccgaagcatggccataatcttcttacggtctcgcgtcgtcagcgagagaagagcggtgtcacctagtacctccggaactgctatgatgtctgacactcgaagacccagccacttcagcctcggtatactaagccgagcattttggtgtagttgtgctgccgagccgtacttgtacgtcgacatgatggccatgccatgggggtcaccatcggtgagggcatagaaacggggcggatgcctgctcgggttggagacggagtcggacattgcacgcaggaacgttcgtgtcatgaaatcggggtatccttttccctgttcgagtacgttgagctcggttgctcgttttggcgacaggatatgctgaagcagagacgcagcttaccgtgaccattattccttctccggccaatgctctggtgtggtaacttattcgcgcgagtcggtggaagactgcctgtgaacagggtgtgaacagggactcagcgtactggtactgcatatgtggtctctccatgcctcatacctctttttcgatgaccagtacccagcgcactcttgaaatatcaatctcgtctccgtcttcgatgcgaggaatcaaactgtcctcggtgacagactgcgcatcgatcaaaatatgggagccacggatcaaacgaaaatctcccgtcaccagtccttttgctgccgcttcctagaaagtggtgcacgaggtcagcaggttgacttcgcagtgatattcccagaggatccagcaggactaaccacattcaatgccgttctgttcactccgatggtatacgccaggtcatcgacaatgcggtccacggtacactgcacgcggaagaattccgggtcgatgtagtatatgtctctggtgattgtatgggtgtgttcagcataccttccagaccggttcctagacattgtcagctcacctcttggagattagctggcccgttcgaatagcttggtccaatatagctaggattcgaaggatgacggctatcagaagacgcagactcggtcagtttatcatctaagaatgatacctaggttgtgttcggatcatggtaggaaagagcttactgaatttccaggcctcatgtgccgtctttcctggccaagagtatttcctgtatgtttcaactctaggactcgcttccaatgccccgttgatggggttgatgatgcaggcaattgggctggctctgcgcttgagggtgatggagatgcttgcctctgccggggactgtgagagtccgtggatgagggctgcgagggtcttgtcgatgaattcttgggctgagggatctcgaccatcgtctattttcaaagtgtgaatgattgatggctcaaccattgccattggagtgggttgggcaaggtgaggatgttctgggtttgaaggataaatgtatctacccgtgcaccgcctgagcataatgcttacatgacactttccatagcatatccagatgaatctgtcatttgaacggtgagttttatataaatagggattcggttcattgctagtaaaaagaagcctttaacttgctatgacttgatcaatagaggtcagaagggttactgtatgtcgaagatttccatctccttcttctcgtcgaatctagaatttatgaatctagaatttattgccttgagcatctgtacgctgaatagtttcttttggtctgcatatcttttctttgaggtctgaggttcttgaagttagttgtatagacctcgggatgccaggccacaccaccactaccactaccgcaccaccataggcccctatcttttgatcagaacatccttgataccttcatcctcctcttcattcttcttctttcaatcaattgttttcctggcctcatatgatgtaaaacattcttcattctacaccgcagtcgtgatactgatgactaagcttccccggtttcccccgtgccttagctcctgagctggttatcgtctttactaggttggcgaaaagatccaattcctcatatcatgtcttctactcctcatattgggccgtggagaacaccagctgatggtcatctcaccccagatgccaatggagatcttaagaccgattactcgcgctggcgattgctcgatgaggaaggccgtcagacatggcggtatctcgaatccgatgtggaaaaccaagaatggccgcagtcagtagctgataaatatcatctgggattgccaacagtatttaaccctcattgacaaaaatctaaatcctccaatttaacggcgcattatagggtcttccagagctgccacaggccaagacgccattggaagctgccgagaatgggctttcattcttctcgcatctgcaactggagcccggaaactgggcttgcgagtacggtggccctatgttcttgctgccaggtattttgattacttactatgtgaccaatacccctattccccctgagtatgcaacggagatcaagcgatacctgtttgcccgtcagcacccagaggatggtggatggggtctgcacatcgaaggccacagctctgtattcggtacttgtatgaactatgtggcactgcgcttgatcggtgtcagcgaagaggacccgcgcatgatcaaagcccggggccttttgcataaatttggaggtgcgatctacggtcctcattgggctaagttctggctcagcattctgggagtgatggagtgggagggtgtcaacccagttccccctgagatttggttggttcacgcattgcaacctgtacaacctctcttttattaaccgactacataggcttcttcccgactgggttccctttgctccttggcggtggtggattcatatgcgccaggtgttcctcccaatgtcttggctgtggtctaaacaatggtctcaccctccagatgacttgacaagacaactgcgcgaagagttatacacccagccatacagctctgtcgattttgctgcgcatcgcaattcaatccacgaggtggacaattactaccccaagacgtggctgttgaatacagccaatgaactgttggttcgggtctggaacccttaccttcgaccccccagtattgttaagcgagctgaggaatggacctgggaattgattcgcatggaagacgaaaacaccaaatatgcggggctgggacccgtcaacaatccaatgaacatggtggcttgctttatccacgacggccctgacagttactccgtccgccaacacagggagcggttgaatgactatatgtgggtaaagagcgagggcatgctcgcaaacggcaccaatggcgttcaagtttgggatacggcattcatcacccaggcggtcgtcgttgctggtttcgccgacgatcccaaatggcgaccgatgttgactaaagctctcgaattcctcgaagaccatcaattacgagagaacgtgccagatcaagagaaatgttaccgccaacaccgcaagggtgcttggccattcagtaccaaggaccaaggctacacagttagtgattgcaccgccgagggtctccgttcaacactccagctgcaggagatgcacggcttccccaagctgatctccgaacaacggttgaaggacgctgtcgactgtctcttgctcatgcaaaacccaagcggcggcttctccgagtatgaaattacccgcgcttcacccaaggtcgagtggctcaatgccgcagaggtcttcggcggaatcatgatcagctacgaccaccccgaatgcacaacggcatctgttacggctctgtcactcttcagcaaattctaccccgaatatcgcgccgacgaaatccgcgccgcgaagcagaaggctgtcagccacatcaagcacgtacagcgtgccgacgggagctggtatggctcttggggaatctgcttcacctacgcggcgttgttcgcgctagaaagtctggccagcgtcggcgagacatatgaaacgagcgccgactctcgtcggggctgtgacttcctgatcgagaagcagcaggcggatggtggctggggcgagtcataccttagtagctcaactcaccagtatgttcagcacgagaagtcccaggtgtgccagactgcctggtctcttcttgggctaatggaagcgggctacccgcacaaagagccgttggagaggggcatcaagctgttgatgtctcgccagcagcggaatggcgagtggctgcaggaagcaatcgagggagtattcaaccagtcttggtaagcttgagctgtcctgatcttctggatttgatttactaacagtaattctagcatgatctcctatcccaactacaagttctactggcctatccgtgccttgggcttgtatagtaagaagttcggcaatgcagagctcgtgtaaaactagggaaaataatactttacagaaatgtatctaatcaataataacgtgcattgagctggtattgacttggtacatgttgtatctcttgttttctctcatcttcccaaatgcaacatccaccccttcctcgttgtggaggagtacaacacgtgaccatccaaaatgatcaacagaagcttgggccactgcggctccttgaaacccccacgattgtttgcgattgctttcattcgaaccaaccacgtccgtcagaccctgataccatcaccatgaatgctgcagctcagggtgacaaggcctcggccgaatccaactaccccatcgctatcgaacactacacccatgccttgagcgagctaccccgcgctccggcatactacatctcacgatcgactgcctattcgcgcctcaagcccgcaaatggcggacccaactatcaggccgcactcgaagatgccgaaatcgcgctccagctcgccaaagagcggggaaaccgcgagtttatcctctccgctcagatgcgccgtgccgtgtcgctgtaccagcttgagcggtatggagacgcaggatttgtgtttgaaattattgctgataaaaccaagagcgagcaaccgctagcgaatagatccgaacaggtgcaagctgccatgggaggaccaggatctgcgtcgaagggcgccagaaacaactacagcgcccaattgccgatttggaccgccaaaattcaacggaagctagcagagttacccaaggacgacccgaagtgcactgtatctgttaccgagttcccgtcttccgtatacgttccgactggagacgagatgaaggctcagtggaaggccctcaaggctggcaacgtgggagtagccggagcctcgcagactaagacacagccggcagagccccagcagccatccgcagaagagtctggttcaactgctcgacttccagactcgagctccgctgcagctgtttctgttgccccggagaaggttcgccatgagtggtaccagtcacaggactccgtggttgtgactctttatgccaaggggatcccaaaggacagtgtcgcagtcgacctgaaagaggatttggtaagcgatattctgtctggccatgattggactttggactaattctaaaacagatctcgctacaattccccctcccatctggctctgaatacgactttaccctcgacccgctctatgcagctatcaatcctgccgagtccaaggtctcagttaaaggcaccaagatcgaactcactctgcgaaagcagaaagccggccaaaaatggggtgccctcgagggctcagccaccaaccccgccgagatcaccgaccgtccagcggcgcaaacctcgccggctcccacgggtccttcgtatcctacctcctcacgcagcggccccaaggattgggacaaagtcgcgtcgtcacttactgcgaaaccaaaggctgatggaaacgcagacgtatcggatgacgaaggtggtgatgctgtggacgggttcttcaagaagctgtatgccggcgctgacccagagacgcgccgcgctatgattaaaagctacaccgaaagccagggaacatcgctgagcacgaactggtctgaggtcgcgaaggggaaggtggaagcccaccctgaatgattatctacttgctattttctgtcttctgctctaagccgcatgtagcgaggtgtttcctgggtattttagcttagttctcaatttaccgtctcttctcaagttgtttattaatactggttcagcaagtagttcaatttgtcgacaaccaaggctaccccactctatagacgagacaccacagtcgtcccatccccataaagcggaatagcagacccagctccatcctggcggcgcatcgtagccatgacagtcccacccacgaccttcaaagaaaacttcgccccttcttcactgggccaattcatgaaagattccccgtcataaacttgctcgaagatcctcgccggcttgatcctctgcataatcggcgaaatacactgtcctttatcggcgttttcctgctcgtacacagtccacacattcaccggcttgttgccgaagagcgatttgttcgcattgtagagcgcacagagagcttctgccgcagggatctcgcgagccccgtccgaggaagtgttggagagcagaaagccttcctcgttgacgattgccgtgacagagcaggtgccgagtttgtcggcctcgaccgcgtcgaagtcggcccatcggcccattttggtcgtatcggcgtgcactattctccgatgtcttatagcggaaggcatggtggttggatgtttggtaaaagagaaaggagtagatagattgtcttgggtgatgaggtaggtgtttgtgtttgtggatggtattttgctaatgcttgtttcgtatttgggttgactggattattctttccatggtgcgattgagtcggagtatatatacacatttatcactgccctgagaatcccatctggaaaattgggctggaatcaaggctgcaaagaacgaaacccaacacagcagcaacccgccatataattgttggctggtaaggttccacgggcgttatagaccggggtattgtgataagggatcgccggcactaagacgaatgaaattaggttccaagtcagcttagggctgcaagtagctatacaaaagcaaaatgataggctgtcggcgcttagcgctctcgtgaaacttatattggcgccggccccctaaacctcccaactttcgccgatccctgtcctgcatgccataactctgcccaagtacggttggataggcttcttagtctgtttacatcgagacacctgcatcattgacggggatggttggcccggaggtaaagccacgtctccgccagcctgattgagcgaatagatcccctcacttgcaaagtgatgctacaggcatgaatacgatatacaattattggaagtgttccaggcctcaggtgctgacattctacccatgtattcggtagttcatggctggaacgacccattcgcggatccgcgacccctgcttcatggcaaacatttcccccgcctagtaagctgaacctgtaagctaggaatgactgaccgctagtttagctttcatcatacgaggcgcgaagtctgtccaacgtacgttggctctgttggttcgtgtttggtcggctcttcccggctcaggcaatcattggagggctgtattatggctcatcgacgccaatttacggacaggactttgttggaaacgatgtatcgattgcttctaggattttcggaacttgttggcactgctagggtccagttgccatatatccatgtccaagtggtggcgtatccaacgcagtcatgagggaggcgatgtgacttggcttgcagctctttcgagctatctattttacatttttgagatatgcttcgtactaataaacatgcaatgatatccaatcatatcagaacctcattgttggtagccaggtcaccaacgcagggaggaatgtgtcacatccgggtacaagaaccaacaaattgagcttgttttctgtttgctccaagtaatgatggcttatagaatcaaaacagtcttgggcagaaaatatccaacgaatattcccgccgttggtgtgaaggacaagaatgggatagcgtgggcggttatttctgagaacgtgcatccccgtgtttccttctgataattgttctgattattcttccgagtcagtgatcagtggacatatgctcatttccggtgattaactcgttgagttgccaagtttgtgtgtttctatagttgttccttatgttgccttacttctttcatgcccttgagctagtatcgctttcaacttgtttttttttttctgctaaaagtcgtaaaatgtatttcgaacctttgtatatgtccaataaatcacataaactttgagtttactcttcctcttcctcgcccttgctatcgcggtataggaaaaattgtataaagatcgccatatccagcagcagcgtaccagcgctgccaatcagccacgacaagttcaccaatacataccggccatacagcgcagccgcctcgccaggacgacaatgcgcacggtggctgtgatggcccaggacctcctcagtcgacccaccatggcaaacaggcgagtatgccataatagaaagcacataagtcaagtttccaatgcaagcaaagaggaagaacagcagggaaacaccatccgttgatttgcggcggtagttcaagagaagctggggcagacgtgatccaaggtacaaagctgcacagaaatagccgaatacttgacccagaacatccatggtgataggttccgggtctggcgatgctggctttgctgccgggctgacgaaccagcccaccacgcctgcagcacagactagagcgacggccgtgaagttgaaaaggatggactggaggacggagatgcggcgacgacgagcgagttgagcacggcggcgcgcacaatcggaagtgggttcgaagaagggcgttgcgggtgacagatgggtggcatccaccgaggagaagatatcatggaaagagtttgtcgagtgccgtcgtccggcggacggcatttgtgtatggtcttcgggttgctgtcccgctacgtttgtagccgggtcctggatttggacatggccgttgggctttggaataagggatgatctctctgttggcgctggttcatgttcggcactattccgctcctcgtcggaagtaccgttggctgcaaaaaggtccggtgtggcggatggagatagctcctccttgaggttgaatccccggtaatagaagcactgtcccagcagaacaatatctgctaaagtgtagtatactgcaaggatgatcatggtaggaagcacgccttgtaggacggcaccaaggatgttgaacacatcgccagccaaccagatgatgaggaagatgagagagaggccatctgcagagccacgtcggaagttctcgatgatttgaggggagaagacgacaacccaacaggcaatagagattgatctaaatgagttagtattggactaagaaacaaaacatacagatatcgccagtcttagtaaatatagatccaacgtcgcacatgtattaaatgaacatgacatctaacgaaaaacaccaaagaaggaaaaaagagcagacttacccacagatgccgctaagggcctcgatgttcaaattagccgcctgcgagggaaacatgatgcaggtgaaccgtgcgattcagagtcaagtgattctgaatggtttgggaggcgaaacaaggtaaaaagtagaattcccagtataaatgaatatattctctggaagatccgactctgtccaagtcgaaaatagggcaattggaggtgcgcgaagagaattggagaaattcacagacggagccatggatgacgtctggtcacgtgcatgggagtatacaaattagggcagggcatttcttcttgtttccttcatttatttcatttccagcagtttatgaagatacgggttagataaggtgatattcccttcaccatggactaccaattcagagctattgacacaatccttactgtggtcacatgatctgcgtcgttaatagttgccacattggcgcccttgagcatccgtaccgctactatagcaaaccatgacactattgtcctttcataagcagctctaacttgtcctgggcatcacagaaaatatttatagccttcgtctctgtcagcaaagctcgaaattgatcaatgtatccatccttacctcggtcagcttaatctgactagcaccacccaggtcgcgggcaaatctgatctggtagtttccaggatcgctgatgagagagtactcctgcgccgggattggaagtgtcggctcaatatcaagtagcgacttgacatctcctacataaggctgagtcaactgtgtcaacagacctggcgagatagtgaggtgatccaccccagcgaggcagaagatctcctcgacggaagtcaagctagcagggagaactttggtgggcgaattgatggacttatagtatttctgaatggctgcgcaaagcgggagcaatttcgcattgtccacaaatctgaaatgagagtgttaggtaggatatcggagaagagtttggtacttaccctgcttgtacatgcaccctcagttcgttcacataaggtgcgatataagtacagccgacctcagctgcgagcacagcttgagccatgctgaacaaagtggttgctaaagtatgcacaccggctgcttcaagagtgtggcaggccatcattccttcccacgtactaggaatcttgatagagatgcgactgacgtcgaagccgggctggacataatggaacaactgcaaaattcctataaatgatctgatcaacatcggctcaattgagcaaaatcaatgacaatgagaaaagttaaacatacggaatgcattggccgcaatcttctccgatgagtatgagtagtaaggattaacctggacatgaacacgtccacgaatatgttttgccattccaacggccaatctaacagtctattaatcgatattagtcgacttctttaagcccatcaatgctacaatcgaagcatgacttaccgcaatctcgacagccaattcttcgaccgtggttgacgagtagttcggatgcagtttcttcgcatctgcctgtgccgccgcaatgacttcagcccgtgctggcttagaaagctcgccaagtgcaatagcctgagcggttagttgtaacctggttatgtagtatcttcgacctgcttacttggttggaagtacagtcctcgaatggacccagggttttggcgacttaaaaatagtcaattatctgaaaaagatcatataataatctctacgatgtggactcaccttcgtcgtctagcgtatcacagtcgatctgcgtgcgcgaacgcatatagtcgagacctgtctgtactgccatattcaatgtaggtagactagtaacgagacaagtagtcgagtaaagaaagggtgtctgatggagagaaaggaaaaacaaagcgaggaaatggtcatcccacttaccccaaccctatagtgcatttaatggggggttttccggggaaactccgcaggtggcacggatttgtcggcccgagtgacttgacactgcatcgagcactgcatgtctattgtagtgcatgggtaatgtgctaggaagtatgacagtatgagagctgggttaagttcagtgcaagtttatatgtcataacaattagtataactataacaaatcgagggatgaatgatgcttaaagtatcccaatcagacaatattcgcattgtataagataagaaggatatatgccgagagaaacgcctcgcgatgcaaagtggaaacccaccccgtataactatcaaactagatatcaaaaatcaaaatactctcttttgtttggcttctatttggcctggttagccaaccacgcctcatgtgccttcttctggcgttcccagtctttgcggagcttcttcgcccggctcttagtgatctcctcgccggtactatcgcgggtaggcatgccttcatcgtcccaggcgctgtactcgttggtacggaacatctccaggtggctcagtttgcccttctccgccttcttgagagcctcctgctccttcttcagcttttcagcctgcttttggagagcccgagtttccttctctgcccgcaccttaatcatctcttgggtgactggccggactagggcaggttggttctcccgatcttcgagggcgataccaacatcgaagaggtcgatgtctcgcacacggtcgcacagggacagaatatccttgccaatagaatcagatgactccaaagacaccaccttgtcacggaagttggagaaaagctcagcgtatggcttggcagattcagaggcctcttggggtgccgatgcttgggcaactgccgcctggatatccttggcggatattccagccttggaccgtgcggcttcacggagcgtgtcacgcatagccgacagagggtacaggtagggtttggcctcctcgggaatctcaataccagaccagccgatttcagtgctgtcagcagaggcggtgccgttaagaccgaagatgttcaccatggaggtaacccattgggctgcagcttggacatccttggagggcacggtagccttgtcggcaatattgaacttagagataagttccgaaatcgacgccatggcagcgggagtgttgaatgaatcacagagctgatcgtagaccgccttcttggcagcttccagatcagcagcaaaggtggtgtcggtgccggacgactggagagctgcagggtcgttcaccttgaggaaaaagttgttcaccttctcctcccatgagctgcctgtgtttatcaaatcctctgtgatctcaacgccatccttccagccacccaggaggaaaacaatgcgcagacttctcggcgaccagtctttgcgatcaagcgcttctcggatggtagtgaagttcttcaacgacttggacatcttggatccttggatggacagatggcccatgtgaaggaagtagttaacccattggtcattcttgtggtcaccgtgccagtatgcctcactctgggctagctcattgtcgtggtgcgggaaggcaagatcaatgccacctgagtgaatatccatatgtttgcctagcctggctgatgccatagctgagcattcgatgtgccaaccagggcgacccttgccccaggtacttgaccagcttggctcacctggcttcgacgacttccagagagcgaaatcggaagcaccacgcttctctgtcgttttgctggccaaagatccttcgccctctgcagccaacttgttgtccgaccggctccatggctcaagccgtgcgtacggatgacccgcagcttcgaaggcattgatatcaaagtataccgatccatcctttgtagcatatccgaagttattcttaacaatgcgatccacgaaggccgcaatctcatcaccgtattctgtcacgcgagtcaactcggtaggatcaagaacgttcaggtcccgcatatccttagtgaaccggtcctcatatctcttagtcaacttggtgaagatgctgtgatcgtccgcatcaaccaatgcgcccttcagggcatcgaggtaaggcaaaataagatcttgcgcgttcgaatagaacgactcagcaaagagagcagggtctgcactcgagctatcacgggcttccgcctgcacgattacttttgcggcagaagaagccgtcttgatgtgcatcttaaccttggcctcggcatcacctgccttgtcgtttcctggcaaagttccaccgttcaaaatagtcgcataggttttctcaacctcattctggtactgcgacggagggagttcggagtcgagcaagggaaggttcttctttaagtaggcgacgaaagcgcttttgacggtatctaggacctccgaggtaatcgtagggttggcggcgacaaattcattaaacaggtgttgttgtctggcgcggaggatgatctataagattggtgagtcaccgtgcttgaggctgtatacacagctccgagccataccttatcgtccacgtctgtaatgttcataacaaatttgacgtcaaacttgaagtagtcgcgcataattcgccggataatatcggtgctaacatagtttcgggcatgtccaagatgcgcgtcgtcgtaaacagtcggtccgcacgcgtaccatacaaccttcttgcccgcagggtcgatcgggatgaagggggtcttggacttggtcaacgagttccataccttcaatggaggcagttgcgcgtccgggctagcgaccggttgccgccatggcggctgctggcgagaagacatagaactgaaagaagtgcctgacaataagaaccgctgtttgaacggtggaaagaaacgaaaggaaagaagggcgggtcgggggaagagcataaagagggaaacaaaggcaatggagggggaggggctcttgtcaggaccagatcgagtcatccatcaactgcggactggctgtgattggcggcaacgggggatgggaggaccaagccctgagccctaattcgtggcccaatcaggcaataggcatgacagcctttttttcttggagagacagcgagttccaaccgcaagttagggattgtccgtaccaattatccgcgctgatatcgcccgccatgacttccccattccttacccggaacgccgtagcggatgcagatagtcttgccctcttgcaactccgtcgcgaccagatcattccgacgatcctccgcgaccatgacgatgagaaccaaggctattgggaaggcaaggtcaccaacacccgcttcggctcattcccacacagcactctgatcgggcaaccgtggggcgcgcagattgtcgcgtcaaaagttgatacaggctcgcgcggtcgcccatccaccaagcgcaaggccgaagagctcgatgctgagacaacaactggcgcagaggaggacaagaagcgaccatcattaagagcccccgtgtctgcggatagtgggttcctacacatcctcgccccgactcccgaagcgtggaccctgtctcttccacaccgcacgcaggtcgtctacaccccagactacagctacatcctccaccgactccgcgtacgaccggggtgtacagtcatcgaagccggagccggcagcggctcgttcacgcacgcctctgcacgcgccgttttcaacgggtatcccgggacagaagaagcaaccaaacggcgacgactggggaaggtatgcagtttcgaattccacgaagggcgcgcggccaaagtgcagcaagaacttaaagaccacggtctcgacgggattgtggaggctacacatcgcgacgtttacgaggacggattcctgctgggcgatcccaaaaccggcaaatcgcccaaggctaacgccatcttcctggatctccctgctccctggctcgcactgaaacatctcgtgcgaaatccgcccccggggcaggaatcagctctcgaccctgagtcacccgcttatatttgcacattctcgccctgtctcgagcaggcagagcgtacaatccgcactatgcgcaagctatcatggctcaatatttcaatggtagaagtcgctcagcgtcggcttgatgtcaagcgggatcgtgtcgggctagataccgagggcgttcgcggagctacaatgtttcctaagacggtcgaggaggcagttgcaaagctccgtagtgatgaacaacgtgccaagctcatccgggagaatcggatgaccaaaggccagccagattaccagccaattgcgaaggagacgccgttctataaagagaagaccgatgtccccgtttatgctcagggtcgtttgactcatcgatcggagccggacctcagaactcacacctcatacctggtctttgcgatcctgcctcgggcttggtctgaagaggaggagcaaaagtgccgggatcaatggccatccgccaaggtcgcgaagcccgataatgagccgaagacaagcaagaagcaaatgaagagagatgcggcagtggaacgggcaaggcttcgcgacgaacaaaagcaattggaagaaaagtcacagctagaatcgggagataagatcgaggaagaaaagttggaaaaggagagcaccgaggcatgaggatgaagataccagttgatttgatttgttagcataagattcatagccggattgtggtattgttgtctttgaagacattctacttcacacatatcatttactcaaaggctctttcatcattgaattgtacgcaatcctggagctaggttggtcgtcaactcctccgacctcaaaccagcatttgcaaatccttacagaggcatactttagcggcaagtatgaattcatgggcgcatcttgactgaagcagctggtatgagaagttttgcccgagaagcagccgtcttgcaggccacctggagacgaacatagatcacgatgataaacaagcagcgagaatgagtactacaagggatcagaaacacaaagaaggcaacgctcatatgtaattctctatgggacaaaaatgctatcaaggccccttctaggtaatggaatcgtgaaatgcaacaagcgaaatgaccatgagtagatggtatgaacaggaatataggagctctcagaggttattttcagctctgaacttgtcccaggcttcatttagggttccaaacacagatccagcaatcatacgctgctcagtggtggcactggtagagatctaatatggaacgttagtatataatctgccaataccacctaagaaggagtaaacataccttatcagggtgcaccttggaaatccccttcatgtactgaatcttaaccttattcggcagcaccagctccgacaagccaatcttcttccacccagcctcgggccatagcacagagtctaagctacccagcagcgcacgcaaattgtcttgcttgccacttttccaggtagagattttcgcgtcgacgctctcggcaagagcaaacttctcttcgtcggcacgctcagccgcctggttggcttgtcgcagacggctgactgcttcaaagtccgtcccggatgccgacgtggccgtgagaccggacataaccgaggccttcttaggcggaggtgaaggccgatttctagcaggggctgtgggtttagattggggcttgttgataccagccgctttctcgcaacggtttcggccttggatgctcgtgctgccaccgtgaccagactctacagccagcttccacgcctgcgctgcatcgttccagtgctctagttgctcaagggcttcggctttacgcatcaaagccttgccgaagaagtctttcataggcttaggtggttccccggtgcaaagatcgattacttccgattcgcccttagatgggccaataaatgttaaaatgatgtcggcgtcatcaatggcggacttgggttcaccgatcttcagggccgtcattgcacgattgctgcggatgataatagtgataggatgtttgtcaggcagcattccaagagcagtggaaaagctctgatgggcttccgcgtagtcgcctcttttgtatgagtctgcggcctttccgcggtgccggtgtgtcgattgaagcgcctcttgggatacaggtggaatagaccgtgttggggctttggggcgtacaggaatggaagctgagcgtgtcgtaggcatggcagagggaggaggctttgaacgactagctgaaggagcgggggaatcaaagagatcgacagtcggctcagaaggcggcggtggcgcctggggtcgcttgcgtctcgcaggactaacatatgcttgagccgtctgctcttcatccttaaaccgtgaaactcgagatttaggatcctgagagcttggtcgggatggacgttggaggaagttgggttgttgccttggctggacagcaccaggggactgttgagtacgaggaggctggcttctcggctcggggtggtgggtttcacggtgacgaggtttctgaggccgaccatcaccagactcaagaagaagcgcttcattggtgaaatcctgctgctctcgttgtgattgagccggctgatcacgacgatctggacgctgcggctgcagaggttcatcttgtggcgaggatccatctctcatccaacgcggttggctggggtcatgctcggcgttaaattcgtttaccgcttgttggaatttcttgctgccagtcttccaaagcgagccggctgatttcaacagggtattaccaaattgggaggctaactgcgcaggatctttgtccgctgatgccggactccgtctgtcctgacgtgatcgagattctgacatttcttctctcatccacgaaggcctgtcgcggttgcgactatcgctccttgcagcgcgatcagtagaatgagttgtactgggatgcccttcagtcttctgccgagactcggcatgggcctgggtgagaagccaaccaacagcagcctgcacgtcggtcccggactcggtggtattcaaagcccggcgagctttatccgcggggaatcccatatccaccaactccgcaatagcccggtcgacctcgttggaaggcataggagatgcatcttggtctcgtccttgagttgagggtgtggcagatttaggaggcggttcggggtgagggatatctgatatcggcttcccaagcaaaccaaggaaatcatcatcgtcgccttgttgaggctgaggagcgggagcggatttcggcttcaattgattgagaccgaatggatcatcgtcatcaaaggcgtccatcccccccgtgttgtcctgcatggaaatccccccattggaaggttctgagcgactgttcaagtcgattcgaggcgacgatctcgaggaggtggggattgggaaatgcgtcgatgcgtccaccggtgcggcagaattgaaggcagccaggagatcctcatcgtccgcgggcggaggtgcagatcgaggagcaggtatagatgcggggctccgcgtgcgtccttcgaaattgtcccagaattgattgttctggcctccgtattgcgattcgaatcgactgcgattttcggcttccttcttagccttttcctcctgcaagcgcttctgctgttctataagagataggttcttgttcccggcggaagaattgaatgaaaccaggttcgcgaagctatctccggcgggagtagcgggctttggtgagcttgagcggttcgaggtcgcagataacggtgtggacctgccggagccaccatttgatggtatacttgggtacaaatacccagagctcattggcggtggtttgcttgtgtttgagtcggaggaccaactcaagccatttagatcctccatggtgagtgagcgtcgcaaagaatgaaggtgacgtctggtgggttcgaatgaggattaggtcccagaagcgggatgaaggttttccataatctcaccagctcacaatatataaaagaagcccaacgcggtttcaatgatcgtttgctgctatcaagcagatgcggaacagttgccccctgcatgtgggggatccggaccgcattgaggccagcacgtgattatacatttccttgtctgaggaaatagttatcagttcactcgtctggctattcaatgtcttgagagtgaggttaaacatctcagtaatcaattgcctctaacatgaactaacctagtccaaggtgtatgtgatgacgtcgatgtgagagatatccagtccacagaccttcaactgagcatcttcttggtactacgttttgatttctcaacaactcagtgatcactcaaatcgccctcagtccctaaaacaacctgaggactattaacggatattgccatggccgcttcagccaactgaagtaaacgaacccggtgaaaccgatggttaaatggaaaagaaacaacctcacgatacacatacaacggatgaggaatatatatgtctctatgcataaatgtcaccactgactcaaaacaccccttattaatggaacctgtggcttcattggcctcgttctgatttgttggttttcgtttgagtggtctaatacgtaatgtctgcttcgttctatcttgctatgtatgtcgtgctgatggatatatttgcaggtttgatccccggcaggcgcccttgaatcaccctcagaggtaatggcaaagagaacaaggaggaggaccaggagaggaggtgccagagtcgttgattgcacctgtgggctaatgagcacgattaactcgagaagcacttgtggaaagtgtaggtcttggaggaaatacgtatacatactaatcaagggtgtctacctcttcggggtatcccacaaggcccagtcatgaaatagtccagaccattctagagggactgaaaaagaatccaaaagcttacactgtggagaccatcaatattgattggtaaggctatccctgtaaaatgcagtaaaaggttcacaaaagcaggcgtgcttcgtcctgaaaccagtgcttagggtttccacaatgcaaccttttaggtcttttctcggtgcttacttgcaggctgcaagtccactagagttcgaaaatatgccaatgaccactcaatcaactactccgtatatcctacgaaatacctgctgacagtctccaaatcggcaaaaagacgaatcaatagtcgagaaaatcatcgaggcccgaatctaaaaacgctcgacctataggatctaggcatatttgtagggccgaagcctagctaaactatcactcaatcattgaaccaagaatcaggggatcacccggtatccaagactattagctgtagacggggcatgtggtatccatttcttctacttttgggccaacgcacatcctatcccaatgtgggatgcgcaatacttcagcctagaactattttgtcttttctggaaacttcaatcaggggtagttggagacggaaagacccaaataactattccgtaaatggtagcagacatctactcatgttctttcttggtcgtatagatctactattgggtggcatttctacctgccaaactccgttagcttgcgcgctaatgcatgaagctttgctcaattggtgattttcgctaaactctaaacgatttaacgtcatggtttagcggatgatggagcccctttttgacgctttcatggaagacattagtccgttcggtgcttgattgtgtcagtggcgcaattacagcggcaattcagcctccatgtcagctcttggtagaaccatacagagtactccttgggaaattttataggtgcgaatcaaaaagtagcaataagcagtggctgactaagatcaagtgaggttatgtccactcgacgaagatcatcatctcaagcgaatcagacaaagcactgtatgctttgtggctgcaggcaaccaacttggtatgtgatatgatagcgacctcacggccccttcctgaagtctgcggtgtcatactccactagaattggctgctgcacaatatcctgtgggagattccacctgcctaccccggcatcccaagcttctgtctcccctttctggtgcccagtgacaaaagtgcaatatagatctgggtctccaaagaccatgattccgcctccaattcggacatcatcgagtgcgtaattcagggaatccgaatcaaatatagattgcgtcaattctgcgcttgcaattggtctgaaattctacaaatgttttcattagcaaaggcggttcaagcatattctttgccctgaaacagtatcccaggggtatgaggagaatgggcaatctatacctgttcggcacccccgcctggggcgaaaaacctcctaacagtaatgtaccaacgctcttctggtatttttacgtcgtatcccgtgaatctgatatgtgctggtaatctcattttcttggcatgaataacgagagtctagtcggcttccatcgtaggaaggtctgtaggtataggtaatatcccaggttgactcgtgtcatcgacgttcttcaagaactagcctcgctggctaagggaaagctgcttcagtttatcactgtcctagctggagatagaacagaatgaatgatatcgtatcatcctggaacaacacgaaacttgtagagtaggatccagaaacaaaatttcttgtcagaatcgtgactactccgttggggatgaagaaggtcagaagggaatgacttctagatcattctgaatcacgtatgcagggtgatcgatagtcttgacaagttcatcgagtcctgctagccaatagatactagcgtggttgagattagctgctaagctcccatacaagaaaagaagaaaacttactaagctggccatttttgtcaagatgttcttgagtattcaccgggatcataatcccagggtatccttcatcgagagtccatacagggcggaacccgtgcttcgcaaggttgcgatggttgcatactcccgagctagaacggcatcacctttgtcgtaatcagaatctgaagtatccaactcttggtcggggtcttcgtaccttgtatgcttgatggaaggtggattaagtctgtatatatgtgtctggaggagatgaagaaggcgagagtgagaagttagagtgtgagaagtaagagtacaagataagggaagtagcaaacaccatccgatcatggcaccttgaaaggaagtgatgtttgaccatggtagctactcagtgaatccatcagtaatctcacgtttgctaataaatgtactatctaggtatggttgccaaagctaagcttgagtggatgagtggatttcgggaattccgactcttccgccagtcgggaaattacgaagtcctctctttagcgaaatttgttttataatttcagctctcactttagttttgttttttctcgcttgctacaggaccgaaaatgacagcaaaaagacagtaaaaaagatgcatgaagaatacacctacgttgtagaaagaatattaaagatgccgatgacaaggccaatcaggtcacaccttattagacttaattccatctgccgtacatacggagtactccgtactattgccaaagactaggcccacacagggatcttcattggcttgaggatatactcaacggaagaatatttagtaggtgggtataccgtctttgcgggaccgcgttccgaatccggtacgatgtatccaatcgatatgtaatctagaccagaggtcacgaggtcacattgtccaacctcgggaaggaatgtgatcgtgtattatgtaatctggttttttggaatggcagaatcgcggctgaaaaggcggaataaaggattgagccaatagaagtatagcaatcacgtgggcggtaggcttaaaaatacgtccgagagtaaagtttctaaaaccgagggggctaagcctaattcagaagccttggtactctttatggtcaaaagtccaggagcacgaataatccttcgaaagtgatcgttagaaaaagtggggtgattttaacggggtttggcttgattattatattcatctcctgggcgaaacctgcatcatcgtggaaccaaatggacattgagatactgttactccgtagagtaaggtaagagtgttggaatggtactcgtatatgcttgtattgagactatacatagtattcaagtagaggatgtttgcggtaaaaaggaaagtcggaactccgctttttcacagcagcggaaccactcgggaggccgagccgcgcggtagcgaatggaaatccaatcggtggatcgcagtgtcttgcccctgactttcagggcttggacaggtatggcttagtcagtgcgcacaatgctcggacctgtcttaatattgatgtaggtaggatatccttcatactgatgatactctgccagccctcattcttaagaaaaagaagaatgaaaccaaaataatccagatttaagaagatcccaaacgaaaaacagagttaagctgaaacgacccaacagagtggccaggcccgtgcttcccgttagctgggtccttgggtgcattgcggtataaatggggggtaaggggggcttgatggtccggagatgaggcccctaataagtaaataagagtcaagacaatcagactgatcaaggattccaacatcaaagttaatgatccttcgcatagcctgcacggtccactgttctacaagtacggagtacaacatagtaccatgcagaaagaacctgggcctggaatactttacacagacgtccagatattatgtcaaggaggggcagattagggcagattaccaggtgaaacctggtaatctaggcttgagagacgttgtctatggagtaggttcatactatatattaggaagcgacaccttcctcttctagctgataggcgtagtgtgctgaccaggaggcaacatcgaaccgaatcaattctccggttttcggtgtgcgttgtactccccagcacttttttgggaacccccctaactcaaccaccgtctattattaacactcttaattgccaaacccataaaatctccgaacatgcgctcgtttagatatataccaagtgggtttgccctgccgcatcgggtaagccgtgtctttttcttctcgtttctttttttcttctttttttctctcgaacggtacgctagtccgtgcatttccgcgtgcgttccacggattcgccctaaacgtacgttgtatttggtcgttcccctaatagggcatggtctgatcgatgcatgtgagctagcgatctatacacgtaccacccagtggcgcctcggaaccggaagtgatttgatattggcattcctctttatccattcgcctcggccctgattcgctgcccccttgcacaagtcaaatgatagtccgttctcttgctttccgactggtcccctcctcctgattccccatacatacggcaatcgatcctaatctgccctcgggaaatatgtacgcattccgtactctacacaagggctttgtgtgctactgattatgctgttgttaatatgttgtatatgggttgtacggaaggaaatgttcggtactccatagttacccccgtagttctaaaagcaaatcagctactccgtagtctgggcgtatccggtaccgcccttcacatactaaagtaccagttgtggattgtatctggtaccttcccaagcttccgctctcgttctcttactcgattcagacggcgccggactttggactttgccagactcgcccctaaatcgactccataaatattcgaattcgaatattcaaattattaatgcccggacgtctagcccgtgctaagatgacccttcgcgagagctgtccacgccccataaaaaaaaaacaataagtattttacctctttggcctgctttggcctgctttgcctatttttacttagtctaccctagagcctttattatgcgatgttaaaaaaaataaaaataagaaaaacatcacattcagatgtcacttccccctctttgtaaactccttatccgaactacattctcttctccctgcaatccctccccgttgccccctttcaaccctcgacaagcctggggtgaacctcccaactcgataccatggggttattcaagcgcaaagattccaagaactccattcaaagcgataccgagaatgatcccatatcaatcaacagcgctcgtacatcacatacatccctgagatcgccaaggtacaagggaactggcccgccatcctcgatcccggaactccctatcgccagacccccagatccagcattggacccggccgcatatctacggagcatccatgccgtgcgcgaacgctccaacatcattctgaaaaaggccaaaaagaaccaactgcaccatttcgacgtcgacatgagcaaattcgaagctaccgcctcttacgtcgtctccatcatcaaggtagagaaccaaacgactcgatcctgtgagttttgcgctaacgtgtattcccaaccagcgagattatgcgccagattatgagaacattcccccgcatggtcgctggcagcacttcgatgtcggcggcagaccgcgtatcaaccagcttctccagtcctggcccagtcgcattgatgcgcaggagcgcacccgccgtttgattgatctgtttgtcgtgtccgtgctgctcgacgctggcgccgggaacgagtggtcgtaccggtccaaggagtctggtaaagtcttctcgcgcagtgagggcttggccgtggccagtttggagatgttcaagtcggggcttttcagtagcgatccgacggagccatgtcaggtggatggcgcaggattaaaaaaaattacggtcgaggtgcttgccaaggcgatgcagcattctgatgagaatccgttggccggtattgaaggccgcacgggcttgttggtacggctctccgaggcacttaacaatcaagacttcttcggtgtggatgctagaccgggaaatatgctaggtgaggcgatctggtggtgtgtgtttgaacagctactaatctttcagattatcttctcggtcatccgtcaaccctggcttcttccgtacctattgttccgatcaccactttgtggtccgtgcttatggatgggttttctcccatctggccggaatcacggacgcagattgatggagtatctattggagatgcttggaagtgctcggatctccccgattgtcctcctgcaaagcagtgggagagcattgctccatttcacaagctaacccaatggctatgctactcgatcatggttccaatgtcaaaactgatgctcatccacttcgccgggagcgacctcctaacaggccttccggaatatcgaaacggaggcctgcttatcgacctgggactcatgaccttgaaaccggatgatatgcagcgtggaatcgatgcatataaagagaatgctcagatcaagggtcagccaagtgtcgaagtggcaccgctcttctgcgccgacgacgatgtaattgtcgaatggcgagccgcgactgtcgggttcctggatgagctcctagacgaggtcaacgctcagctagggcttaagggctcggacgagccattaacactagcacaaatgcttgaggctggcacctggaaggtaagcaactcaaggattctccagttcgataaattctaacaagaaccagggtggtcgcgagattgcggaagtttcgagaccaaacaccaaggaacctcctatcatgatacgatctgacggcactgtcttctaataccctctattcccattttaattgcggctttgatacctgatatcttcgtccatcatttggttttgctatttgggacgagctttttgatgaaatgaactcttcatgaccgaataccttcatacctatacttcacgtttggcttttctacatttacttcaattcccttacttcctacttcctacttcctttattccacctttccttctctcctctctccttctctttccttctccttccctttttccttctttttcctaccttgagccttctctcttttccctctctatttgaggctattcatcagatttaccactggttttgggcggcttatttcatactccatctcaccttttttttttctctctacttgacaccctcatgttgataaaagccatttgaccatagaacaaagatctatgattttcggagacccatgagatgtcgtcatcccgtaacctcggcccaagctcaaatagaacaaacagtgccaacagtgacagtgccagtgccagtgcacgattgcgaggtctcatcagatcagtaacttgatgaaaactttagagtagatagattgctggcatcgtcttttcttcctatctcatcccacaatctatcccaacactttagaacatcctgagatcacgtgctcgggacagcattgttccatctccgcattagaagttggagctcacctgtcacctttccttatcttgctctctcgtcctcaatcccgttgtcaaggcagaaaaatgataatattggactcctaaccggaactcgataccattgcacctgactgaccctgtgaaggcactgagttgccctccagatcgacccgagttgcccccgcaagagcggggcattcagctcaacggcagcgccacgaacatctaacaccatggatgctcggaagaagaagagaaaggtgctcctgatgggcaagagtggatcggggaagtcgtccatgcgctcaattatcttcagcaactatgtcgcaaaggatgtgcggcgtctaggtgctacgattgatgtggagcacagccacgtcaagttcatgggtaacctcacattgaatctgtgggattgcggagggtgagtaatgcgtactccttgcaatccgggaggcatttcactaacaccgaggttttccagacaagatgcctttatggaaacctatctggcctcgcagcgcggcaacatcttctccgacgtcgcagtcctcatctacgtcttcgacatcgagtcccgagaagttgagcgcgatctcgacacctaccacgcgataatcgaagcgctgagcgagttcagcccaaacgcctacgtcttctgcctcgtgcacaagatggatctaatccaagccgagcaccgacagcgcatctatgacgagcgctccgccgtaatccgcagccgatctggcgatttccgcgtcgacactttcgccagtagcatctgggaccaatcgctgtacaaagcctgggccggaattgtgcacaagctcatcccgaacctaatcgtcatcgagcgcttcctaaccgccttcgcgaagaaaatcaacgccgaagaagtcatcctcttcgagcgctcgactttcctcaccgtgacctcggtgacctctgaggtcggcgagctgaatccgatttacgaccgccacgagcgtctctcgaatatcatgaaggcattcaagcactgcgccgcacggaacaccctcacaacaccggcttcggcgggcttcgtcgtcatgcatactaaaacaccccagtttaatatcttcctcggccgcttcacggataacacctatatcttccttgttgtacctcccggcgaggcttcgtacaactgcgctgtgctcaacacaatgcttgcccgcgagggattctcgaaagcagcggctggcagtggcggcggcgatggcttccctcttcctccaccagaaacggcagatgatcatgcgaatgggtatgggtatgggtatgggaatgggtatggacatgggtatgacaatcccacgtaaaatgggtagttgatttgccattgggtctggctttgtatagctacataactactaggggatgttgtctttcccttccccccttcccccttacctcccttttggttttttttgttccttgacttctgaggatttatgacaaaatacagcaggcgctgaatgatggcgttatggattaatgttttcttcttctttctttcttttcaactttctgagaattgagataccctgtgggatttttttgtacttttttttttctaaaaatatcatgaaaaattacccaggtattctgcaaactattgagaaagctcttgagttttatataaaatctatgtttttcttccccattggtgatggtgatgtatatatgcttgacgttgtagatcatgcaatcggccttgtttcaaatggaactgccatgttaaaaggaatacaggcagcctgataccaatgtttctatatcaattccctgctgtatactgcatagaagccaaatcgctacaataatgacaacaagaccttgatcattcatggcatttacttcatacaataccgcagtgacataacatttcatccgaaccatctatattcctagcatccgatgcagaagcgaaacgcataagagaagaataaaaacatgggagggatttgattatctatcggaccggccggcctcaacggagaaggatgaaaaaaaaggtgggaacaaaaagataactcggacaagaagggcatgaacggctgtacaaaatcaatcatccagagagcttgaacgtttttcattggatttctggcatgcgcatggcaatgtcgcccgactgtgtgatgtatcgcacccaggggagagaggggtattgcagctgtgggagttgattgttagtgatagattataagaatccactgatgggaaagacttacctttggttcggtgatcttcagatatcgcacttggatgccgctggtcgtgaaataggggatctcgaacttgacgttgatgggacgtttcgacttgcctacgccgccggctccgcccatgctgcctccgaacccaccggtcataccgccgccgcgctcgtcgtcacccttgacagagggtagacctagctctgcgcgcatgaggaattccttgccgccgccgaattgcttgatcttccagatgatggcggacttctcgggagcgtagtgcacggttccgatatttgtgcggaagcgcggggagtcggcgtcttcggggacggggacgagaatctccacgttgttggcggtactgcggcgtttgaattgggctttggcctgtcgtgaaatactggttagggattgatatttggtaaactgggtgggaatgttaccttgagcatatattcaattcgggatcccgagtgcgattcaaccacgcactccacccagatcaacggcttcacttgtgtgttcagtcggtagctcatgagctcgaattcgccgtccggagggatgaaactgattgtgcggtcattctcgaagcgcgaaagtcggacacactggtggaacttcacgtcctccatctcgaccgacttgcctcgtgtagcacgacccgtggtctcgaacatggctttgtcgttcaagcccaatcgcaactctggcataccactcagatagcacttcatcttgacagcgcccagaatctcagagcgcaggacgtttccatttgctgaaacgagaagattgagagactcgaccacgtcgaggaagacttcgtttttgcggtagcgtatcccctcgctgcgccaggagacagcatttgtgacagcgatgggtggccgtgcttggacatccagcttgtgtgactcttgggtgatgtatctggtcatagcgcaggtctgttagttatgctgtttcaccaccacccccgccgcaccagacccagctgcttactcttgtagaatcttgctctctgttgtctgcgggtatccaaaatccatcatctcatccagtaattcgtaaatgacgacgaagttatcccgaatactctcctcctccaataccttgaaatattcggtgaagacctccaccagcttgtggaggaagagtagaatttcggtggcatttgtgtttcgtttggtcaatgcgaggatatagaggttgctgtggcggatatagaggtactagacgaaaacacccctgtgtcagtacgtgggagcgcacaataggagacactcaggagtgggcgtggtcagggcaatgcccaggctcggtgggacgcacattgattccctcgtgagagaaacagggaggaactgctgagctttcttcttcggcatcactgaggaggatagggaatttctcgactgcggacatgggaatatctccgcggtaattgcgggccagtagggtctatagatggtcagtgggggcttgtccctggacgcattgacgattttcccggcagggggtcgcatcgccctgttctgcacagtttccaatagcctaccttgcccttgaggtcgaggaagaagagtgccgacgccatgacgtgtcaatgggggtaaatagatgacgggagaagtggtgatgatctggtctcttgagatgggggtgcgaaagcaaaaaaataacaaagccaccttatgcgcctactgcagcattgtcaataaagcagtaagaacaaatagaatagcagcagatgaggtgagaaatgaaaggagcagatcagcggaggattgttggcgatgcccgcatgtcccaggccggagatagacgccaagcccaaagcggactagcgtagaaaatcacacataaaagcccgtcgcgcacttttttatttcttctttcttcaacgctcccaatagacagttcaaggcagtataaagtcctttgtgattttctacagctactccggcattctgtcggagtgctatagtgttttgattactaccttgcgatacagtggtgcggagactacgatcttacgagggttccataagagctggccgagtactttctctgttactcgggcggcgtcagaggaaccgtacatttctataacttcaaatgaattttttataaatcgaatcttccttgtaaattgtcctaggtgcttattttgattgtaatctgctccattcaatctgcaagtgcaactctttcaagtggtatttggcagtagtctgagaaatcaaacgatataaaaaaaacaagtctgtttagaagtacatgtacaatcgtagaggttccccgattgagaagttcactccccagtcaacctaccaccgatggaaatatcaaacaagataacgccctgaaaatgctccaaaggagaccaataccccaagcccaagtcttggacccttacgagaccgacttgagtcctaggggttcaagtatccgctcacgagccaccttggtggcaacaactcctcccttctctagcgaaacagcgccaacgatagcgtacatggtatgcgcgagaacgagctcaataccggaggcacggaggtcgttaggctgggatcttcgttagctggtgatcaagaacaccaaagactaggatggagacataccattctgggactccatctgagaaccttctgtaactcgtacttgtttgcaagctcagcgagcttcgaccgctcggtgaggatcttcttggtctcaccagagaggttgttcaatccatccagagccgggtgggtgaaaggcacgcgaccatactcgtccttcttcggtgcggcacctgtgtacggagaatcctgtgccaaagccagcgatgcttgcagctgcacaatgcgttttcccaggaaggccagtcgatcgttgaatccgcgacgcccttggtcgaaactcttatgcgtcactgccaaccacttggtctcgtccgagaggagtttgtcgccgccattgccgaacaatcggatgtagaatcggtctagcaatagcggatctgcattgacgtggaaggtcgggcgcttggagtcaaggtgcagactgaacggggcctttgccgccgcgggagtgtaggaccaccggggcttttcttgttgactggactcctccgatgtagaggtcgcgaagttgcggcatgggatgactcccgcaattgggcgaacggcgaatttggatgcagcgcaggcggtcctggccgctcgagaagaaaggttcaaagacatggggtcggtggtctgcgtgtctactcggagttgatcgaacggaaagcaaagaattcggcctgggcggtgtgatactgccggtcatcaagtacccagacccatgagttctatgttcactgttgctcatgtctgtttttcatgactgcaattcttacaaaaacttgttgctgaacttaattctgttcaattgccatctcgccggtttgacatgcagttaaacaaccttggaagccggaggcaaccgggaccttcaccgctgctgcgcggtatcttctgctcgaatgcttgaccttgtgcaccggatccgaagcgactaacgctgattccggctgttgcagcctaccacaggccagcatggctatgacagttggaggtggaacacacacaaacttccgactctgccatgcctcgatgcatatatgatcaaaacggcatatgactcacattaattaagcaccttggaagcctatgtggaacattttagcggtcaggctatggagcttctgaatgatgcttcgatatactccataccgctagtcgcgggccaaatccagcacacataggctttcgtttagcttaggcacggcccgctatgatacacgatgtgtatttaccccagctgctgttgctagcagctttgactcatgttttctgcatgtgcccattgaaagttggggttcgactgggtgtagatggtctcgcggatatccccactactttgtccagcaacatccttctctggataatatcgctattatatgaaccaataggaaacctgtgctctctcaccttataggttataggtccaatagtgctgccaggtaacatcatctgactggctgacgggcgacgcaaccgaccatgagcgcggcccaaagatcagggacacaggtctccagccgctgcagagaaacggtgggaaatccaaaagaaaagaacagaaccatacggaaggagctaggcgatcaagaaacattcaaaagaaggttcggtaaccttctcggaacacagtcgttccgcgaaacctgccgggtatgcagaggccatagctacctggagcacggggcagtgtttttgggcctgcctggttgcggatgtatgcagctggaaagctcagctgaggcacagtggttggctcgaacggcccatgcctctctggactgcggaataacggccctgctgtatgctgtatcatcgtagcctgagctcgtcccctggattaggcaagagactgtcatgtaccgaaggcaaaacatgatccacgtgtattggcgttcggtcttatttggccgtgctccataggtacgcttcctttttctcatattgcctcttatggtcggtggaagcttctacgacttgcatatccattattcgcacgactaagcaagttcgcaacccacaatgggcattgtgggagctccgataaaaggaccgggatatgttaatgacagtgcctttgcccatcttcgaaaggtcctaagtttgaaagacacaagaacacaagctcctcaatgtttgatggcctcgaattcatacttactttttactaaaacagcagacggctgttcaacccaaacattattactaaaagtattgaataagtagccaacggcaaatcatctagagcgaacccagtgaaacagaatccctcaacagactgcaggaatccgaagggtcagaccgctggtggaactctgccgtctgcaggcagttgatccgggggagaaggatttatactcgttcattgcggacattaagttgtatactatttgctttttgaggaaagataatagggcaaagtggatctacttccaacttcctgtcgatgcttgcttccggggaaatgaaaagaaacaaaaatataatactcacgatagcgggtgtgactgcctgcgggtactatctaatggtttatacatcaagtcttcacacgggcccttgcagactctaccaagatattgatcttcacggatagtcatccccaaggtccacggatagcaacgggaatatgaccatcgccaaacggctttttgtcttgatccttgatcgggatgttcgacagggtagcggtgtgcgactcatatcgatggcgacctatgaccccagctaaacttgagtcatttaaatagacatggaccagtccggatttcaggtcatcttcctttaaaacaccagagttctttgtcttcgtccttttcccgtgtttcgttgcagagctatacttcctttctctgtcaaccctgacttgtgtgctccatttcactacaaccacactcatttcgtgcatttcaaacatccaaatggctttcaaccctgcttttgcccatggcttccagcccacccctgcatcgccggcccagacatgctatacatttacgggaagcgacccggcttgtgatcactccgtgcaagatcctccttcaccccgacctttccctcccaaccctcctcctagtcctgcttagatggcagttgcttgggttttatttgcttggcgttgaggcgacacgggacaataggtgagtgttgtctaacgcagccatattctagatccgcaagatatacaacggccaagtcacggagatctgagtgaatactaacttacttacagatcataccccaacgcattttaactgcggtctgacggggatatgcattgatggcgactacgactgggataccataatacgatgtgtatcggtgctggtacaagaagaattgcgggtggaaaatggcaaagtcacgaggcacactggaccctaaggggactgcatgtgtgagagtgagagtgaagatggccctcgagtgacgggttagtgacgggttagtgacgggtttacatactcgatgtgtttttctcatccgcatatccattgtctggcaagatagcttaatggaactacatcaagtgggaccgattgcattttcacactgatacatgacatctagaagtaggcgagaagagcatctagactttcacaactcaaaattgacatactcgtatattcagatcgtgcaagtaatctagcccaacccgaacgcaatctccaattaaaacagctgaacagacgaaaaagaatcagcgtcttttgagcttgcgccaagtgacccgattcgtgtatattttagaaaatcaatttagtaacacatagggaaattcggaggtatgggatacggaaacatttaaatcaaagcaagaccaacagcactggcaacgctgagaccaatcacagtccagccagtcttgatgataacagggttagtgagaccacggccgagatcccacatcaagtggcggataccgttcatgcagtggtaggtgaaaggaagggccagggtagtcttcagggcgaccttggccgcgaaagggagggcacccatggcagcgaccatggaggcagactcgatgtgccatccgagagcgggagaggcaaggtaggcagtagcccaaaggtagagggtgccggagagagccacaccagtgatacggtggagggaactaccgatccagccgatctggggcctgtagatgctaagatgaggggcaacaggacggcgaagacgctgctggacgaggatctcgttggggtcctgggtgtttgaagtgacttgtctatagaccatattccctggttagtatggacttttggagattgcggatgacgtaggcattcggcatgtgcttgattcgaagacgagcgaagcaattaaagcttgtcgtttaagcgctgtataactgaccttgtctgaatgttcttgctgagggcaacggccacaggcgaagcgcccatcatggacgaccgcatagcgagcggttgctggacggcaactgtccgggataagttagatcgcagattcggacaaggtaggaattgggctagacatacgccgtcgcagcgattgttgggcaagcttctgggagaacattgtgattgcagagttgagattgttctgtttgatcaggatagaaatcccaaatggctcgcgatggctcggaatggacggacgacctcgggtacgggagtcttaagtcacgggacttgcatccggtcgacagcggctgccaatcagatccggtctattaccagccggaatatccttattcccgacgcgctaccgtggtcatgtgactgctcgcctgttttcccactttcttcctttcttccgtccgctgctctctcttctttctcttcctcaagagtctccgctcacgtcgtctactggtcttggctgggatgatgtcgtcgtgttaagctttccctcactgactgcggctttctgtcgtggacgccgagggatctagaggctctcagaaggagagtcccgtcgttaatcgcccgttccactctaccaatgaggggaaggggtttcatattcagggatacatactacatgtatcacatccattgatgtttgtagatcgccaggtttttcggacgcagttggtttgaaatgtcactgcaactgttgaaaagcctgcattcgctgtggagaagcatccagccgaggcatttatgtttgcacggttgctatattcactcgagttatgcagttatattcaattcataatggacaattgaaacaatgatcttacctcttacatgcgtctgttcgtaaattgtcgtcggttgtaaactttcgaggttggagatgaagctatacacggttggttccttgtcacatgtcaaaggtcaaccatggcatatattctctcccttcttaactaggtctgggcttgatattcgatctgcgggctaatactcacaagtagataaagggctctagacctcctagcgacatatgaatatccctttgttcagtaatcaaaattgcagatgcaacctcggcacctcggaccttccccacaagtaaagagatccgccgcgtgctgacatccgtttattatctgttcaaaaactcgagaatctgcttgactctgtattttccgaagcgatcaaggaagcgatcatactcatgttagtatatatggtccctattcgggttttatcttctttccttggaagttactgactccgcatcagattagataccccgacttaacaagatgcctttcaacacagccttgacgcgaaagctcggtattcgaggtgcgctatgaattcattattctgcaaatatcaccagctgctgatcacagatatagtgcccgtcgtgcagggtggtatgcaatgggttggatacgctgagctggcctcggctgttagcaacgctggcggacttggaattgtatgtttactcttcaatgaaagccctaatttaatacagtactaacaatacaatccagctcacagctctcacccaaccaacccccgaagacctccgcaaagaaatccgcagatgtcgcaccatgaccaaataccccttcggagtaaatctaaccctcctccccgccattgttccccccgattacagtgcctacgcccaagtaattatcgacgaaggagtcaagattgtcgagactgccggtaacaaccccggccccgtcatcacccagctgaaaaaggccggcatcatcgtcctacacaagtgcacgaccatccgccatgccaagtccgccgtcaagctcggcgtggactttctttctatcgacggctttgagtgtgccggccacgtcggtgagcacgacatcaccaattttatccttttgagccgtgcgcgccaggaactcaagattccgttcatcgcctctggtggattcgccgatggccagggtcttgctgctgccctggcgctcggcgctgagggtatcaacatgggtactcgctttatgagcactgttgaagccccaatccaccagaaggtcaaggaggctatcgtcgcggcacaggagactgatactgcgcttgtgctgcgtcggtggaagaatacctcccgcctgttcgctaacaaggtggctaaggatgcattgaagattgagcaggagagtaagactggcgagttcagcgaggttgggccctatgttagtggcaagcggggtcgtcaagtcttcattaacggtgacgttgatttcggcgtaagttaattgcaaaattatgtttcatgtgcattcgctgactctttcgttatacaggtgtggactgccggtcaggttattggcttgattcacgacatcccaacttgcgaggtcctgctcacccggatcgagaaggaggccgtggaggcgatgactcggaccaggtctttgtttatcgatgctccctccagcaagctttgaggggttttatgttacagatgtggtctcaggcgtatttagctttttattgtttagaaagatctaacagaatcattttgggattttggtgatggcccggctttgtacatttgcgttttgaatagtacttccaggctatcttcacttcacgctcgtcgatccacgtcatttccggcgctgaaataagagctacccactctccacaggggcttggtcaacggtcgcattcccgagcgagggtccgtgatattgcatcaaggatctgcaagcacgcagatccgcggacactcgggcattcctccaacgccaacctccaacaataatgatccaacgcgatagcgaagcttttgtccaagcctactagatgaaattgaaaaagaaagaatgatattttcttcaaagcccgcgtgtttccatgtgagatcaaaaaaagagtggagacatccttgcatgcagtcgatcctcgggggaatgcttgaatcttctacgtttccggctctgaccattggttctgtctcagttgtagcatcgatttctcgactatgcatgatatcattcatcatgagtggtccccttaccaccaacttacaccgtgatgcttagtattctcactgtagatcgtgctgtttagagcagggttagaatatctcgaagtaaacgtagctgtacttgaggttagtatacgcaatccaacagcccgagcaagttgatcaaatcccattgcgtttcacagcagccggtacaaaccagcattaccccgtgaggatctagatagtgacatacctcgtccaacgtgtctccagcccagaattgaacgcggccgaacttagcctcctcccggaattagttattcaattcatatatcccaaacccagcattctgacagctattccaatctctatcactatcaaaaccaataccaacttcacatctccaaccacatacctataccacagcacactcatcctcacacaaacaaatctctccaaaatgggcttcaaatccaccctggcacgctgcatgcgaaaggaccgtctctccaaaagactctcggcaacaagcaccaaggtccacgacgaagactcaaacgatctaatcaaaacaacctccgaaacagtctcgacccgcgcaagcatggagtccaccttaaccatggtgcaccactcgttccacgaaccagtcctgccaggcgagtcgccggcgaaccgcatgcagatcaggacagatagtgggaatatgcggacgttatttgatgaagacactacttccaaccaaccgacagaccgcgctaccaaggcgctgtctagacccgcatatccgattttgaaattggattgtcggtcgcctgtcgatgcaccgaggagggtgttgcaggagccttgggagatgtcaacagatgggaataggagcaaaaccccggtgattgctggttatcccggaaagggtgcttcgggcttttcgtctaagacaacggcccaggagggtctttcgcccactgagaaagttgtggccgagaagaaggataagaggtctatggcggctttgctgaaaagacattgtggattgaacatcccgcgctcgtcgatttcaattaaggcttcgcgcgatcttcagtcgccgaagtggttggattctgctggggttacggaggaggaggctttggtggataagcaggatgggaagtgggtggaggtggatttgcatgatgagaggaggaggaatagtgtctggggtggtgttgcgcttgggagactttggtaaaaagtagtggatcggaatgagtgttagttcttttgtacatagttggcacggtatttaattgaagtcaaaattgaacggttgtctctctgaacgaatggacatgatgatttgtaattaatttccatgttgataaatggattgaagacgaggcaacatgaaaaggaggtcatgaacaggaagtgaaaaaggatctagctatgccccagctggtttcgtcgagggggccgatgtaatggagtgcgaaggagcttaggatactggacgccgaaagcagacgagggagtctagtgaattaggagagaattgaccgatctgagaaaatggatgatgatgcaacgagtctaatgaattaaagtaatatatatggaaaagccctaaccgagacagaaactgggccgttccaatgcgcagggaacaagtaataagcagaaatcaaaacaatcttctttctccgagggtgccacacgacacaagttaaatgatacacgagatggttcaaaaggaatctaactaatcaattgaaagccaaaagcctacttcccatgcccgaaatcgataacagtccaaaccggcagtggtaccatactctgcaccaaggtccaaagagctggcgagattgccaatgctttttgcgtgatgagagaaaacacggcgagacgcttagaggatggagccaagggcaacacaggggaggccgagaccgatgaggtcggagttctgtaagatatgtcagttgtagtcgaaatagcgtggatgttggagcactaacggcgctggaaggagagttctggcagcaggcaatgttctgcttgcacttctggttgatgagatcctggatggggacaccaatgaggacggggatctggagatccagcttggagcactggtcgaagagaccgaggccagaagcaccggatccggagccgatcaggttgctgagggtaccaccgaggattccggagttgatgtcggtggtgtcaccggcgtagacagccttgttgcagcaagagagctgggcctggtcaccacacttggcctgagcctgcttgacagtcatgttgtcggggacagcgaagcgaacgtcggtgttgcccttgttgccgacaccgttgccggagccagcaccaccagcggaggcgcctccagggggaagagcgtagacagtggcagcgaggccgaggacaatggcggagagagagaactgcattgtgacggtggatttggatttgaacgagagaagactcggagagtgtagaagattgaagaatagaaggaaagagtgaaagagagtgtttgatgtggatgaagaaaaaacaaaacgagggcgatgaatcacctcatctttatagatttgaccggcggtctgtgagtcgccctgactccatactctagggccaaattgttttgtttcctgccaagatgatatccagtatgtccccggaatgttactggttaggaaggggagagggagatcgctccactccgcagggcttgcaggccaacgagggagctcctgtggaggctcctggtatggatctactgccaggttctcacttcacgcgactagggacatacctggcattcccttgccctcgctcacctgcctggccgaggggagtgtccacaaattgcctgtaatgtttggatgaaaacaggtgtaatccagatacagctatgctgtaccttctctaactacaaacatccatagcccgtaaacctaatcaaagtaagcttaagctcttcaagtgggtctaagggcgtccctggagacttcgatttcccagtacaggggcttttctccctttcattggacttgcactttagaagctaaggcatgtaacgtatacactaattactcatcgaaggcacctgactctactgagaaggctgggattcttcctctaagtggtcgaatctccgtaggaggatcatctgcaagggtgactgcaccccgggcactaaacctacgtagggagagaaccaagacactcccttcattgtttaatttcctttaaactacgaggaattgagcactgtaatggtaatcacgagccattcccgtgaagtctccgattgggatctcgctttcccccgagaataatggtgccgattgcgaccaagcttccccctggcggcttctcacagacatgaatcggtcttgtttgcatggtttgacctcacacatcttgtacccttcactagattcttagtcaagtaatctcttcccttagtctatctgtagtctgcattgctagtgtaccttacttctcaatttagtcccctgtcgcattttctaatcaagtcttcgatgacctcgagaatggccgggatcttgctagattcattcaaaatgcgtatcgcaatcttattgagagtaagtccgtcgatgaattgtatagtcacacttgaatgaggacgatatggagaatgtagtggaaaatgatgcctggcgtcctttgcgctgcccacagtattagatagtacgtcattctagtagagtatctggtagtcaatggcctaatggtcgctacttggggtaattccccaactagtaaagtgcaacgctgattgatagtcaaccggctgttctagtagtcttcacgtaatgaatataccacaatctcataataggttagataattctctctatgtctctaataatagtttggttgtgatcttcttattatacttcctgctgaagtagttggggtaggaaatatttgtttgaatgtagaggttctaaatatatatttcgtcggaggacaacgattccaagatacagcacacaatatgtatattgtagacctaactacataacaataaaaatagtgttttcagatatgcaattgctcaatggatttaactatatcatttaccaaatttcctaatagtaccttcatggtcgttcatggtgccaaccaaatggtcgaaatgtctctctcctaacgcctgccgcacctcccacgcgtgttcaattaaatctgaaaaaatacagagatttgacgaccatctctagcaaaaattcaaggtcgcgatcgatccgattgagtattttttttcagcgttgaccaggcattttcaatggggtataccctactatggctattaggaccagttcccattctacatcaactgatcggccgtgaataagcgaattatcttgcataaatgttccttcaagatattagtaaacgcgaggaattgcagcctctaaatctccaaaacatcgcaatacacggcttcaaatgagggtgtgagatccgctatctagggatgtacggagtaccagggtgcccgccgcttgctatggtcttataaaacatctatctatctaacgaaattccgtatttatatcaattcaaaatggaaataaatcaagggaacagatctgaaggcgcatctcctgaaaagacctccaaccccgaaacaaaatcattccatagcatcttcgaagtcatgggcgcattactatatggctggacaccagaagccctcaagagatcattcatccgaggaagtaagacatcgactgcctgcgcttccatttcgcgttgaatttctctgctgagtccaccttgttcaacgtaccacgctgagtcttccttcaaaaccacgctctcgtaaaggttaagcaagctcgggtcaacatttgcatctatagcagcttcataggccatcctgtgaccaatcgcctcaactaatggaagagcgagcgggaggatatctcgattgaaccgctcgcttcggtgaatccccttggcaccttgttgaaggagatccctcgcttcggagaacagggaggcctcatgccgagcaatggggctggtggaatcgttcggtggcggcatttgatatcgaccgagcaatagttccgacgcgagtcctgtgtttcacggttagtcttcctcgagaaatttcaagttccagacacgtacggatagcaaggacgcggatatcaccctctgcagtcgatgcgccgcgcatctccagctaggaaggagaatcagtcagctgtcaaaggagtaagtaatactaagatcttacctccatctgaaggagttgattatgctcataatgcccgtgccacccacaccgttcattcatagcggtgatgcttttgctgaaatgacccagtgctatcgccttgaaagctgtggctataccatggcgcactcgggggtcaacgctctgttctcggaacgctatcgctgcagaaactaggaatgcttctagcacactatactgggcgatagcatggaggatgggcatatgttgagtccggaaatcaatcactgccatcggggttccatcctggccactaacaagcctgttctggctgaaacaggcagcattgtaggcagcgagcttgagtgacggtatgacacacccggagaggaagagagtccccactgcaacgcggtgaatcgaggataagaactcttcgcgcttgtcttctgttccttcaacactaccaagtaaggcggattttggtaggcgaacgtggtcaaagtatgtgagagcatgatcgactggatgcgcaccagttcgtggaggcaaggccctttttaaagattagctcttatagttgaggtattggaaggcgcttgcggctcacttcgacataatacccttgcacatctcttttccgtttccaagctggactaggaatggccggattccagagtctttatctccactcacaagacgagccatcacaattgcaaccactggaataccgccccttggggtggttggcggcatgaccctgagactatctgttagacaatttcagaactgaatgcttatattctgcagcttactttgcatcgtttggggaaggagtatgaaggtcgatgtcaccatcaggcagaattgttgcggttgtctgtatattccgtgcatctaatccatgattcacttcggtcaacataaattgtgccctggatttcagccccgttaggtataaatatttgaagatttgcttatggatagacccacgagatatcgaaatccaaagcggattggaggatccgctggagctctggacgtttcaatgcaaaaggagccagcgtgcccacaaatagattgcactggatactaaggagggtgaaagctccaccgtcgagtgttagtagaggctctcggtgtagcttccagaatttaggagtgatgtataaaacatccttaagcgtcaggcctattacagttagtggttgcatatagtggcggaagataaatagggaataccatatgcattagcaaaagccttcgccctctggtaactcagtctggtagattcctctagactgagagagcgtggggctggcttgaagagttccgaacgtgctagatcctccatggctggatctacctgctgtagctgcagcagaaactgctgtaatccgttctccatagtgggcagttattctgtatgaagggtttgaatatattcactatcgaaaagggaacacttaggggtatataaaccacccgagagaaactactttatgcatttcagcagggttagccagcaatatcccgctttttttcgatagacctgatcggtgctgaaatttagaacacaagacatacgtattggcatagtggatcgacaaaaaagataatgccagtttctggttatagggtttagcgactcatcattcgatgctgccttcggcttttccttcctgtttatggaagccggaacagatcggtgtattcggatcaatatcacgatattatactgaatattaggaacatgtggattctgtcaaattcatggctagctgggtctccattttttattgactagggtggatccaaggtatagtttgtctcgcgtgaggatcgaatataagtggatttgctgaccgctagaacaaaaataggggtctagcctgttgatcgattaagttggtgagatcgatctaaatatcttaaaagtttcggatcttgaagcttgcattgatctatgttcgatagaacctcgaatccggagaagatcgagtgaatactaggtccaaatgcgttatcggctactccggagatttgtatgcaattatttcttttccatcgcatgtgtattgaggagccttatcattgtggaagaccgtgttctcgtatagagtacttttactttgtatgcgggctatgcatgcaagatccccactgctggagggaatatactcctcactatcttcctacactgagtactccttacatagcgccacgagacgaatcttcactgtatcttcctgtatgatcaatgcaagtgtagttcagcacagccagagagtcgatacatccacgatgactatattcaagcttatgctgcatactaaacaactcaaaccaataaatcaacccaaggtgcattagccatatcagcaagagtttactagacaaaattattagataccgaaaagatacagtggcaacttatattctatatcacaatgaaagaggttgcataagctcttgattagcccagctcataatcgaaagtacctgagactcttgctcaagcgcgccatccccgaggagaccgaccttattggatattttggacagatactgtagacgacaatcagcatagtgatgatgtagacagatgacacaatgcagcacttcgatgccgggaatcttgccctggcttagtggaaagtttggccatctacatgatcttaccgatattttggcgtagaattacctcgacgagctcgtatggtactcctttgagttcggcctcgaacacattagttagtttcctaatatcgggctgtgatcagattgacggcaagatgtgctaagcatataggggtagttagttatacaaagatcaaggcgttgatattatatattagtgattgactttcaattacgtccaaatcatatttttcaagaataaacgagtcgtatatattattcccagaaaaaaacaagtttgatcagatcgagccctagtccgcattgctttgcattcaatacatgcaatggaacaaatgacgatcagacaaaatgaattaaaaatctgtttctcagaaattgaacaagaagattattagatgaaaagcgccaaaagggaaataccaaaagcccagagactacacaagggtagtttcgatccaacatttccgtaagcgacagtttcagttggctcggatcctgaaggcttggagacagtgatcccaggggcagttggcggaagagaagaggtgggcttgcagctagttgtcatcttcgaagaggacgcgtgcgcatagtgatgggtcttggaaggagtactggtcgtagtaacaaccaccagattcacagatgttgttgaggaacaagtgaccgtgctgaactcaacgagcggcacagttgctgtgtgcgaggcccagctgatggtggtacagggagcctgagggacagtcgtggctacagtctcaacaaaggtacgtgtgttgccagtgatgtgagggccagcagtggtcttgggaacgaggggagaagtgcaggttgtagcaatgtctacaatagcagggttctccgggacgaagggggcgcaaataccagcgaagtaagcaagggcggaatcttcctccgtctgggaggtgctccaggcccgaatgcacccgctaactttgtccgtaaactcggtggatgggcagaagcatcccacatcgctgttggagtcacacttaggaatagagagccatgtgttgagacacttggggaccacgttggggcaaggggcagtaacagcgggcgggctgggcgcgattggggttggggtactaatgggagtagtgtgcgaatggacgaaatgagatgttgtgcagcttgtgctaggggtttgcacgggcgtagacgaggtgcaacttgtgctagtggacgtttgcacgggcgtagatgaggcgcaacttgtgctagaaaacgtttgcacgggcgtagacgagcagggcgtgcttgacagtggatgtgtagaggtagtaagaacgcttgaactagggcattcagttgcagttgatgcccatttagtgacgatgatctcctcagtagtccagactgtggaagtcgtcatatggtgccaagaatgactagtcgtaggaacatccggcacagacgaggtccaatggaaaggaggcaaggaagtagtcgacttcggggggtccgaaggaaccgtctgcacgggcgtagatgggcagactgtggttgacagtggatatgtagatgtaatcaaaacagttgaatgagcaggacagttagtcacggttggtgggcattgggtgatggtgatctcctcggtagtccagaccgtggaagtcgtccaatgctggaaagagctgctagtcgtaggaacctgcggcacggatgaggtccaatggaaaggaggcaaagaaacagtcgagctcggactaggctcagagtgatagtgagagtgagagtgagggggttcaatgacaggaactggtggcttggacccagtagagcagtcaaagtcgattgaatggatctcgagatcacaatcaccaaacttgctctcttcaggaagcgtgaactcgactgaaacagcaccgccacactggtcattgccaacatcggttcccttgtacgagctcgaagtgacatggtgacaggaagaaccatcgggcatctcatagatgatgaagatatcagtgttccgggaagttgaaagatggaagtttcggattgagaatggagcgtcggcggcggaaatcttgattgtccagtcatcatcacgagaaagctttcccccaaggcaagtacccttaaagtagttagaatcaatagcattttacatatccaagagcgacctaccccgtaactagatccatgacagccattcttgggctcgaggccaacgaagtggaagccttcaaagctccaattgtcaccgtttgccaactcagacaagtcgaagcctttctgctgaacatcggagcactgattgtcggtgttctctggactggtgtagcagacatcggtaccccaccactaagatatccaaagtcagatttgtattcggagttgtagaatggaaatactcacaaggccagccggatgagctagtgcagcgctaaaaagcgaaagaagagcaattcccttcataatgggcaaagctatattagttcaagctagtaattaaaataatataataaaatgagtgaatgacgcgagttgggcgtgggtgtaaaaagaacgtggcgaggtttgtcgactggatgttggatggagagcttccaagagtgccaggacatggtcctttttaacctcaaataagatattcggacgaactactcctactcgggctctactgtcaacaaaatcagaaagtagaaaggaatgtcagccacaacagcataggaattccccatcgatccaatggtgagaactcatactcgtgaagcagctggattcactgaaatcagggatctcacatcgctgtagttcagggaatcaatgcagggggaacattccagtgctagaagccccgaaagccaatcagagcagtcggtaactattcccgagctatagggctcgctcaaaatctcccgcaagcccaaagggttgggaattatgcaaggagctacacctctcgatttatttagcagtttggaaagacatgttcaggttataccaatttgtatcctacagtctctaaacactttcctagttatgaatgactctattagtaccgttgtaggtttgtgacgtgtattcggtttcaactgaaaatgttcaattttccttcatactccctagatatatcaaagcctgtatctatagttcgattgtggtatctgcaatccacgaggcgttgaaatacgtggaagagatctaaaacagggcaaactaaatatacattcctgctcgcgcattccaccagaaagttgcctagcaagtaatcgtttcattttctcttgataattgtgttatatcaaataaagcttgggcaaagcccacacataaatctgttgttgactattcgtatgtccgcgggaagctccaaagggaacttatatcgagtggagaagatagcgcaccacgggtagcaggatatttccatgttcgaagagcatgctcctgagatcgtgctgctgagatgattgtctgagtgccagtcctgcagtccgcattgtatctcgaagccaatcagtagcaaatccgaaatctagaaatcagtccgttgaagaacacggaaagctgaactgcgaagtatttcagcattgtaatgatctaagcttcatctgaaagaaaagcgatccattcaatcaagttaaatacagcgccgtcgtggaggatgtaggtgcagtcctcgactcgacttagacgctaatccaattcgggattagcgtataaatcgaatcatttaggcaggcggtgactcttaaatgaacgcacggaccctctatttcgactgggtagatcgcatccaccgatctctttctcttttgtcaattgtttatctgactgcaagtatcgttccttttattgctcagcatgtctgactcgccagaagtttccaaacctgttccacaggagcgcgccagtagctcgcccatccctgcttcgtcgggccttgagacggaagccaagcatgacatcgacagccagaaagaccaggcggaaaagaatgacccccaacccaccgaagaactggagatccccgcatccaagtcgcaacccgatgaaccagagcaagatgaagtgacatctgcaccaccactccccgacgaagtcccacctccacttcccgccgaggctccgcctgcgaaggccgaggacgatggatgggaacctgcatgggacgccactgcaggggcatattacttttacaaccgcttcactagagtctcccagtgggaaaaccctcgcgtgccacaggtcccaggagtcccggaaatttcagcagcacccggcacagaagacgcagcccccaaaaaagagccaatacttggtggctacaatcccgccatccacggcaattacgaccccaccgcatcgtacgcgcagtaccacgaagagccagcacagcccacgaacgcagccggattcgaaccctccgcagcatatgcagctaccggcacatttaaccgcttcactggacgatggcaagctgcaacaatcaatccggagaatcataatgatgagaacaagtctcgcagacagatgaacgctttcttcgacgttgatgccgcggcaaatagccatgacggccggagtttgcgcgccgagcgcagtgcaaggaagctaacaaagcaagagttgaagcagttcaaggagaagcgtcgtgaaaagaaggaggagaagaggcgggcttggctcagggattaatggtgtgtagctatgtttaagttctgggaggaagggagggttattcgatgtattctctcgttgccaccggtcgcattgcaatttcggagctttttgataccatctcaccggatgtgagagccggcgtttgagcttgtttgattctttttttctcggcgttttgcatgtggatagaggcagacagacttcctgtcgtctatccacgattgagcaaagttatttgtacagcgtaccatgtatcaacacaaacaatgtctcataatgaggctctcctagtaatttagattcgtattatacgacacgttgcgactagcgtccacgttaattcaacgacttctattgtaccgttcactgatagcccactatcagtcacatgacccgcgatatcaaattattttttgcggcgatcgcttcatttgttgccggatactctacgctagaaagcaaagaactgaaagcaaaggtaagattgaatgtattccctgttgattgactggaaaaataccctcaacaccgactttcattttgtggctggaacttagccttcacattgaaacgcttatcaacgacctgattgcatggatatatcgcgggggaggatgcgtactatgcaaaatccccaattccaagagtcctttatgattctagatatcctaccctcgctttccttgctcattgtcctgtcatcttccgtgaatatcgacttattactgacgccttactccagctatatcaaataaagtgggatatcaagaacaaccccaccaaaaagaaagagaaaaaaaaaaacataataccaaaatcctggttcatcacacatcatgtccgcctccacgacatcacaggcaaagccttcagtgccaatcgcactctctgccgaggcagtcgacgacctgatctatgacgcccgagccggcgacctcgaggccctaaatgaggacatcgccaatctagccagccaacacagctgcaacgagtcacagatcgtggcatccgccatagacatggcagatgagagtgagggcggctctggatcctgcattctgcacttccccgctgcgaatggaaactccggtatgtcatttcaacgacttgacctgacttgcttgtttactaacaccgctcagaaatcctcaaaactctgctccaaaagctgtcatctgcagacgcagcgcagcgtgtcgcgttcgttaaccaccgcaacaactctggcaacacgcctcttcactgggctgcgctcaacgcgcacctggaatgtgtcaaggcacttgtagaagccggcgccgaccttgaggtcaagaacgatgctggtcacgatgctgtgttcctcgctgagcggacggcgtgggctactgttgaaggtgatgaggaagccgagggtgctgagggcgatgatgctcaggttcaggagattgagatgactattggtgagaatgaggatgaggagaagcctgctgagggcgctggtgaggtatctgccggcagacaggttgttgagtggctcctggcttcggatggtggcgctaatttggagaagggggctactcagggtgaggctagtggatctgcttgatttatgttcgaggaggtcggaatgacattggttctttttgggcgggattggaaatgattgaagaaaagtttaagatttcacgcatgcaatcggtgatatgggtactttctattcttgcatatgttgtttgttcgtgtctatattaatgcattttgattatttctatcataatagtacaccgaaagatgctgcagggcttttagaatgctgccctagtatacagaatgttcatatcctctcatttacatatcagttcaatcactgcgaacttttcccgtcaccgagccggtgcaagacgagacccccataggtagcggagtagcgggatcgatctcccgaacttttgcatcgaagccgaccttgaagcgccggtctcgccagacgactgtcacaccgccatacaccgccatgatccagataggcagggccagcaattcgcggccgagccaggcggcgagccattgcatgaacggacgacgagtaatatgggatgatcgggagcgttgaggccgagcgaaatctggggtatcctcatccaactcgatgcattttgcggaatgcagcatgatatatagtgtccaatcgaccaggatccagaagactatgccaagtgcgaacaaaacaaaaaacgcacgccacgtcccgagacgggcagcaaattgcacgccattccgctcgagatacggcgccaaggcagtggtgatgccccaggcaccatagagtgtgcataggaatgactcagtgcctggttcgacaagcgtagcgagaagaacggtaaatttacggactcgcagccaccggacacgccgggcgatgtatgccggcacgctcatgttggcaacaggctgaatagccatgtcaccaaagaccatggcatgcttgccccaacgctcgcggagctctttctcttcccgcacctgcttcttccacagtagatcaccaatcagatggtcctcacagatattgtcggagaagaaatcgatgccaggatggcgagcttgggaacccgacaccgaatgactggtgagatagtcaaggtgggagcggcggaacatgttagatttccccacgatgcacggcgcaacaagtaccgtattgatcgcggtgtacattttggcgtgcgcggaggacaggaacagctcttctaaacgaccgcctccagtcgcgatcatggctgaaggcccatcctctggacggacggacggcatcgctgcggccgctgtatcagcatccgtggcttctgggttggcatctaggagcgcctgccgctcctcacgcaggttgctatctcctgtaacatccactgccacaggtagatggtgcacaaacttgtatttcttgctcgatgagggtccagtcccgcacagcctgtctaccatccgggcacagactcccttcccgacccagacattgcagtcaattatccagacgatatctcctttcgcttctctgtatgcgcggctcatatttcggatcttgggattcggtccgagcgtgtacgtattgatgccatcctgctgcaagaggggatcctcgtcttcgacgaaaatttgcgcgtccacatgcgggaagtcgttaattagtttgcggagggtaggataggctgggtctgcacgcgtcgccacgcagagacgaatgctgagcttgtcgcgcgggtaggactgtcggaaggtggcagcaaggcagtcatagaggtgcggctcaaggcctttgacgggccggatggcggtgacgtgcggtacatcggaggcggaggcgtttgttagccgtgaccgataaggctggctgaggaaatatttccatctgagcagaaagggattgcgttaggacatggtagctcaaaaatagcaggccaaatcgtacatctgaaaatatcctaggctgcacaccgccagtatgaatgcataccaaatcagggcaatccagccgattgcgacggacgcgtacagcgcgccatcgtcagacctgcgagcgaggaacgaaaagataggctttagcatgggacacgaagggaaagcgacatggaagcagacgaaaaggacattttggaggagaaaagaagcaattggatcgggtggattctcatttcggcagttagctgtctccgccctcacagtcaggtacacggccaaccagaggacatctcgttccactagtatacggagtcaatatcaaaatagcttgtctgttcggaacccccggatgtaagaaaacgtacttctacagttgaattggggcaattcggcaattggttgctattagattattttcgaatgtcattatgaagacaaaaagatccatttccccccaaactccaaggcctattccatgataccagacgcaatgcaaattcccctttaatcaagtttttttcttcttccggaccaagctcgcattcagcacgttgacactagtcggctctgatggagtaggttgcgtgtctcccgatccactcggtgtttgggcattcacagcgggcatgttgtcctcgcccaatgacttctttcgcttgcggatcaatccgagatcaaggacattgttggcggtggtattggcaggctgagtagtgctgctcgtggtgttggtgccgacaaccttcttgccccacgtaagctcatccgcgagagaggaaacttggtcgacgtagagtttggtactggcgatgacttctttctcatcatagaaatggtcgagaaccgaatccatcatcgttttgtagtccggttcgctgagaacgacttgtccgcgtccggcctccggccagtcgaaagggttgacagtgttagatccatcatcccggggaagttttggggaggtatctgtggtcgtcaacgtggcaatttcttcggactggctcgagccattctccactttcagctcgcccgaaatggtggagttgtcagaggaaccgcgtgtctgactttccattgacgtcgagttcatcagaccaggaggattgatcactagccacaggaagccaactaaccgaccagcagaacattcctggcggaaggacatcatctcccagaattggtccaaggaccgtacactgcgccagcgtccagcattgggggcgacaggctcaccttccttcgattcaggaagttcactgtccaggtcgacgaggaaacgagtcttgggatcgtcggggaaacgaggcactaagcagcggggaggagccgaagggtcgtggtacaattgcttcagtgggtagctgttgagccaccgtgggcgatcctgtgcatcggtcttggccgtaggcggaaagaaattgcgcgtttcaaagcggtcgcagcttggaacgatcaagtatgcggtggcagaggccttggcagcttcgactgtttgatccagcgctttcgtctcttgaagagcagactctggctcgtgctcgcgtaaaatcggatcgagaacacaacaccaccacttgattaagcctcgatcgtccagaacatgcttttcggcgttctcaatactgcccgggaataggtactgattctgggcgcgggcgaacagcgacacgaccaggcgtacaccgggccgctggcgggttcgcgccagaaatgagagaaatgtatttgagaccaatctcagaacagagaccttgcgcggtaattttaggagatgcaggagaccagtcgagtcggctttggagatgaagatggtggtcaagtgggccgtgttgtagaccatcacctccattccgaagataattgtttcaccgtcatcattggcgtcaattgacacggagaggaaatgattttcgcagaatgtcggctcggagacctggcccggcgcagctgcaaagagagcctcgcagggagtaggagttgaggagacatggcgaacggtgatctcaacccccgtggggagtgccttggccaagagatctgccagatctaccgccattattgttcgtccaattagagtcgtggaaaaggtgaagagaggagctgaagacggagctcgatttcacacccttgaagatcacgtgccaggaacatatttgtaccgccagtccaagggggtcgatatacagacatttggacatctttgatgcggtagtccaattgcgtaggtggtgatgaggcagtgaagactttagcaatgggattgaggctaggtagatgaccttaatgaaagaatgtggcgaaaggcttattgcatagactataacgcttggtgccgagcatgctatactacgatgaatgaatatgcgatatttgacgcgttaacgcttgtgctctcaccagctcttgcacattcactcgctcttgccctttcaccaaccttttccacgcttattctctcaaccacaactcaaatctcactcaatccaaactctgctactcgtggacacaagcagaatcaaacataccattgaaggtaagcaagactaatcagattaatctttcattgagcggaccaattgtactaatatgtcatcgaacatgagaagcccggcttcaagtgtaacagagccgcaacccggtcacaccgagagtacttatcaagatgtcttacaacccccccggggacttcataggtaagtctatacttgtgtcacctcactataatcagaatagccactaatcatgcatcctagtgcccgacatcaacacacaggaagtctgcactcagttgcagatccgttacgcctgcggtcactcgacaggcggcgagttcgttaaatgcccacggcacgtcaaaaaagaggacgaacgctgcaccagccgtcaaatcaaccatgtagatgtcaagaattcgtcgcacaagtgtcgcctatgcctgcgaagtgaatgagatatggtatggtatccaatcggcgggagttgatggtgagctttatcttgagatcgtcggaagggcgaagacgagggttatggcatatgaatatcacattgacaaaggagccgatactgtctatcttttaatcaaggagaatccggaaagaatccgactagggttattaacataaatccctgtaaaaagccacacacggggcattgatgtaatggtacataagtgatagtaggaccttggtaccatagttgggccggatgccacttaaaagtaagaagccacagcatctagatcatcggcattgagtagaatgactccttctctcaaaagagtcctccagacaaggtttcgtgcacgaatcgggaagtgtggcgtgttccaatatctagccccaataccgcgctcatttgcggtggaaatttggtcccggagagctttgagttggtcgtctgagagaattggatctgtatcgacagttatcttgccgacggcttcccggaaattcgtcgaagcaacaggcgagataacgccagttatatcggcatatttgggatcattgagatctgccagcggcgcatcgaagaagtagtctcggtctttgatgggcgctaccatatcgaacggtgtctctccggtgccaatgatggtgacgggtccattggtaacggttttgccatccttgacggtagttaagtagcccttctctcttagaggctctaaagcggcaattaccgcctggaacgtctcggggccggatgttttcacatcaatgaagaagtaaagcgtttggtcgggaacggtatcccacacaccgctgtttcaagaaagcattagcagtgagaccatatcgggtcctggccagatactcactttttagttggcgatgatataaatggactctcggggttctggcgctctagcacgtctaaaattgggttgatatacaaggattcaagagttcgagactccgtcagggcggattcatcgtggccaaccttgtctaattagcatgctacccagaagagcgcgcaaggcatcatcggttaattaagctcacatagagggtgccattgtataaccagacatcggcttcggtagatgtgcagccatgtgagagacctgggcatggtaatgttagggataatcagttagatagtagagctctgcataccggtatagaaaggctcgtctcgccaatagtcactttgggataatcagcggatgaacaagtttggagtgaccatgagaagtgtccttacttatgagaatgaacaggaatctagagattcgttgcatccagggttaacaatattccagatggcggaaaccccacagagtttatcgatacatggtgccacagatagactcacgggtaatagatctcttgttagatcagtgggatacctatagtctgggctgccatgggtgttttttaagatgctctgtaggctagaggtgatcgccccgagagctggatccggacccgcgaggagagccacagcaacgctagagaggaataacatgaaggcagagggcatttaatgacaagatcacccgaataattgacccgcctttatatatcgagctggagttgaaagaaggtggaattcaattgactgaattggagaggcaaattgcgatgacgatcggaacccggactcacgtgtttccacaaggggtatccataacatcgaggtcgaacattttccaagttagtatagaatgaatcgagttgatcatttgaaactgattatatctatcatgtggtcgctctctcgactcttagaaaaagaacagccaaagggcaatcaaagtgcgacaccaattaagagctgatcgcactggtcatttacttgagagactacaagaaaccgagaatagtaatgtatggtatttggcatgaatggcagacatggatttaagaaggtgctaaaaacatgaaaatcgcaagaccagcaccgtcgtcatggaacttgaaggcggaagacagcgagattgtagaagaaaaggtctgattatgaaagagacccatacgtcacggaaatattgccttaaacctcccgcacacttggcgaagaggcagctccagagtcttgtgagttccgaccccgaaggctgaggtttccgatacgttggaccaggttgctgcccacagcatcaactgcacccttgggcgcaagcaaagtcgggccttgagcggcagcttcttggactctgaagagtttaatggctgtgccgttccaaacaccaactgttcctggagttgcaccagaagcggaacccactaccatctcgctggagaagatgaagccccacagcaacgattcgtaccagcccatggaaagtgcggaccactcgaatgattgcacgcgaaccggcgttggttcggagattatacttgtaaccccaggctcttcagcaaatgatggaagattgtggattagtgtacgggcctccggactagcagcgctggcaagcgctgcatcgggtatatgaggtgcaatggctgagattatggtaaggattgtatgcaatggaagctctggcaaccaagactcgagctggcaaatattgttagtagcgaaacatttattggaaaaacggttcggtctgcatagacttacccatgggacggttggtgtgaagccactaggagagggtgtgaataaagcagacatgcttgtttgactggtcatgctgttctgccgggagaatggaggatgtccagctggtttctttcctcgtgccttttcggacattcctcgcacctgctgcactccgttctcatcaatggtggatgccatggagggtctccgtgaggtatgagttgagaatgatgattgagacggagtctgtgccccatcttcacgttcatcatcggagtcatcatcgccaattgcaaatgggctgttttcttcggggatcctagtcaacggcgacctggcacccgaaggagtatgtagatcatcctctgactgcgaaaatgtagggctaatagcgacatctgaagaactgctagctttcttcttctcattctgccgctcgatctcttgttggccactctcgagagtgaaagcccgcacggcctcaaagcgttgcttgtacttcagtatcgagtagacaaggtatgagttgtctagataaagtcagaagctatgaccgaaagagaagatctgggtagggtaattaccgatgaacttgtgctcgaggatgatgttaatgaagtcaagcaacgatgcaagaagagtatgattggattcgttcgccaacaagaagctgggcgcggacatagaagagaaaagctgaatgacctttgagcaggcgctgggagaaatatgttcgatatagggagcgatgttgttgaggatgatcagaagtggaggatacacagtgtctaggttccccttgctggttgtcatcaacgtgtgaattgactgtgctggttagtatggtattatttagatggaacaaaagacaaaccataatcagatagtcggcataagatccccggaacttgagcagtcggatcgattgtggtaaggtctcttgagcttcgaaactgttgttcaggctcttcgcaaatgtcgactccgcactcattgtctgaaggatgaaaacgcacatccggaccactccttgtttggaaggatccattctatattccatcgcatagaagatacatagaacaaggaagtcatgggagcgattagagtcgatgataaatgaccggaaccttttgttgcattgcaaggtctcccagaaaaggaccaacatctcaggggcccattttaccgatttttgactcccaggaagatacgaagcggtagcttgcatctagttcgatcagttagcataacttcttaatacacgagtaagcagagaataaataccggctggttcagaattctcgtcatgccatccaccaggaactggaagtcttgaggtctatgtagcctgccgaagtaatggcgataataattcttcggtggtgttccacggccatcttctggaataggatacatcaaaaggacaagaagaagttgcacgcaataaatcaccaaaatctgcctgggatctttccaaacaacgtggtcatatgggactctccacgacgcggggttatacttcatggcctgttttggattagcatagctccaccgccgattgagcaaaacataacatactgtgttgagaagagagcaaaggagggtcaagacagcctgcttatcttggcatgttgtgatataagtgattgccttgacaccctgaacgggcaatgtatctataccagtcagtaaaagttagagtaccttggttgtatcagactatgaactcactagacggcaaatacatggcctttccagtcagagtaagcataagccgcagaatctcgcatcggttgctctccaatgttttgttagaccccatagccgtgttacagccgacaccactctgccaaattgaaaaagagaccttgctctttgcagttggaagtcgtgggattgtgaagtcagcaaagaagagcaagtccatcaatgtgtctatcaactcctcagcaagaggcttcaaatcttcgtaatcctccgcacgcggtgatgtcgcctcttggttaccctccgattgtgcttcgtcgaagagtacctccccagcaatctgtgattgtcttgtccttctccttctccgtgtccagaatacattatcatccgattcctccagatgctccgcctcgtaaacataggggaggagacgagtgaggatccgaatgcagttgaggacctcacgctcgggggcaagatcggggtcggggaatgagggatggtttctcaatacagtcagtcgtgatgcgactgctagtatgagtgttttgaagttgggcaaggcatgatcgcgtgtgcgtcgtatgtcagccggtgtgaaaaggctaaagacatcttcggttgattcaggaagttcccagaactgccaccgtggttagcctccaagtctccaggacatacagtcaatatgtatcagaacgtactcgggtccagtaggggtcgtctgcggggatctcctgttcctcggagaggcggaagataccctgtttgaagacaagcttggactccgaagctcccatagcaaaaggaaagagctagtagtcacgccgttctcggtttcatgcggattttcacagcaaatttcgaagtgtaagtgatgcgagggcgctttctgcctgtttatttgccgagtgctagaagtggttggcggtcctaatcgtccgggcgcgggatcttggcttgaacacggggtatggcagatagaccgaatgccaacagtacggtttacagtagacggtactccgtacatatgatgagacatcacagcagaatgatacctcatcttatatacatctccttatcctattctgacctatttgttgccatgtatcaaaaggcacttttagcatccatagggaggacggaaaaaatatccaacagccaccggtttcggtttctatgaacaacacgaatgtacgtcaaatgaaacgagcctgtaataataagcgcgaattggtatccttgaaatacattacgaatgaagcaaccgctatgacattgaacacgttaaacaccaaaaccatgaatgacccaagtgcccgttcgcaagtttgtccagaaagctggaaagaatcagggggctcccccgctagccgaaagccggcggctcctctcatatagccacttgttcttgacccccagacttcctcgttttcccataagcggggaaggtgtgcctgggcccatgctcatggtcgactctccaaaggagttacttcgagtcagaggggacgaggatccaaagctctggcgttgaatagattctctgcctccattcgacatcgctttgtaaagcagggggctggatacaggcgagaagggtgtgctgatggaagagcgacgctcagaaaagcttgcattcgcggaaattggggagggctgtctgctagcaggactggccttgcgtgaagaaagccggtatctgggtggggtaacaaatactgttccaggcgttgctggtggtgtggcagcaggatccaaaccaagaagtgagcgctgggtgggggtaaggggaatgtcggagaggtcgtccgttggccggaagaggggagagagggccactataacattgaaaacgaagaagagttggagaatgaataacgggatttcttgatagatatggttggtatcgagtatttggcgtaagcttaaataagaccgttagcacgcgacgcgacggatcagagttcttatcgcactcactagcttttgaaggtagatccaaatgtccagctcagtatcaaagctgcgccgttccaaacgagcttcttcacatttttctgatcaaatgtagctgcattttgccgccgaacgatctcttccagttgagggtgtcgccattttccaggggtcagggtaccctctggagtgggaggaggcagcggaggtgtcgctttcggggtggaaggaagaaattgagtggccattgctaccgtggtgaagatgatgtcgagagtgcagagtgaggtgaacttgactggagactaggatcgtgaaatcagctactgatccgtagatgcgtagactgtttttttgcgaggtctttttgacaagagggattggactcactgatattatgaactagtttagtacttacctagaagggagcaaacacaagcagctgtcagttagtagtgcacgtagcaatgaacaattcttctttcaaaaagtcattattgttgttgtttggctataaattgacgatcccaaagtggctgcgctcggcgctcaaggaaggggttgcacgggcataagttgacccggccaagctgacacaccttatcgccgtgcccctcaacgtcataactaactagttgctgactgttgacacttcttcatcttctgctccccatattgaccaactaaaatggctgatacttcacttgtggagaagctggataccttggtggccgatgttctcgccgactggaatatctacactaccattgtcgccgggattgtcctcgcttttgcggtttactctgtcgtctcgtctcgggatccagatgtgcatccgttcttacttgctcgccaatcgacagcagccccaatccgcaagcagggtgaatctgctacttataggtgcctagaaaccccatatggcttacctcttcgcttcggactaaacgtcaaggacccgggcgccccgaaatggaccggcggtcgaagaggagacctacgtgatatttggaagactgctgtgcgtggagctatgaatgaggacggtactctttcgggaaatcaaggcaagatttacacggtcttgggtcgaaaggccgtcgagcactctttggacgaggtgacgcaagaaatcaatgtcatcggtcatcatctccaaacttccggcgcgaaaacggtggctgtttgccttacagactctatcgagcttttagctacaatctttggtgcgtgccttatcatcctaggtgtgagtctcgatgtctaaccttgcgcaatataggtggtgcattctatggatacgagacggtcattgtgccgcacaaccttccagccgagacattatcagcacatcttcaacaggtaaaagcggatgtccttattgctgaagccggatctctggacctttctctcgtcgccaagggtaacaatcaattgacgctcgtcctttgggttgccaagtatggcaatcaacacatggactggaacgcactccccgagaacgtcgaagatactctgaaggttgcagtttggcatgaactggtcgaggagttcaaagaaatcgctagctatgatgtgcctcagtacgacccaaagacagcaacccctgccgtccacactgtttggccgtcttcctcacaatccggccaatttatcgatttccagccagaggtaagaccagctcaacttgtcaacttgtctgatatcactttcactgacattcaactagaacttggtgtctgccatcggagcattaacctccgccctccctcgtactcagcgtttcaacccaaccgacattgttcttcctatcgactctctttctcgcacctaccctctctgcatgactatggctgcactgtttgccaactcatccatcgccctgaactctgttgctggagaggatgtcgatttcgctttggctacagctggggtgtctcccacagtcattattgcctcatctcaaaccatggctgagtaccacgacaatatcatgcgcccgcacactggtatcatttcctctcttggacgctggcttcaggcacggactttagatgcaggaaacatgccgacgcgcaacgttttcagccaattggctcgtgtcagtccgacatctgagctttcgctagatgaattgcgcttgctttgcatctcccaccgtatcgatggcgaccctgccgtccatcttacctctgaacaattgaccgaccttagaatcttcaccggggctcggcttgtgtatgccttgaccggccccggtgttgctggtgcgattgcgcaaacaaacgcctttgattatagatgcctccccggtcctagccactttggcgccccgctgagtagcactgagattactctgaccaatatccctgaagactccccttacggcacagaagagggacaggtacgtcgagtccaattccgccactttcatatagaactaacattcacgtctagatcaccgtctctggccctgctgttgtcggtggcaccgtcactcttcctgaacgaggccatatcagcaaggacaataccttggaattgtcttcctgagcgtatcaatcccaaaatagcattctttatagcgtacttgaaacttgaactgccgggacatttggtaatgagtttgtgtatatttcatcaataaatttccaactatatgtataaatgtttggctgctagttgagcctttagtagtctatttagatgtcttctcggatgacacggctgtcctacgcattgcttttatcagattgctggtgacatgataaagattacttggaagagtatgttctgatgacaacccttaaagactctcaccgtccaatatgagctctccatgcatcagaacgcatttcttgtatgggattcatatctaactcggacagcgaatgtcattccttgttcagggcagaaatcgaagtcagtatccaacaagtggttgagaacagaaagaagctgtcggttgtcggattaagcgttgaagagtcgggcagcggcgagtgttttgaggcataggcgctagaatagaaaagctcaaagttgtttgatatcgcaatttataaacacagatgaagtacaaaggtagtaatacagccacatgtatgcaaatgagggtcacgccggacgccctctaactcaatcactgccggcgattgccgccacccaagaaagccttcttctggcgaacatagttggccacaacattctccacgctgcgacggtcgtgcttgcggtctctcaagaagtacaatctcgcccttctgcgcttcttctccgatcgctggacaatctccacgctgttcacgttgggactgaagaccttgatggacatctcaacagcgacacgagtaagctcgtttcgcagaaggaatgacgtttcaattccgcgcaacttgatgctcagaacaattccgttgaatgggtcgccgttcttgaatgtcactcgtacgatatcgcccgtcttgacactgcgcgggtttcgtcggtagtcgaacatggccttgcgctcaccggtaggatcgaggactgccaattgcgattcggtaactgctgcaatggggtctttgcatgctttgcgagcagatggcggagcagggtagatcttgaggggctcacgctctacatgagatagcgaccattagtacagctcgcgtcgttgcactcgattggaaaggacctaccaggatccggacgaaagcgaagaggtatttgggataggaattgctcaggcatgtttgggggaagaggtacccgttcgggcctcttcgaataggccgttgaaatgaatcgacggttgatgaagggttggacaggctccgaggcccgtagcaaggaccttaagcagcccagcgggcgcattgctggtagagccgccatggttgtgatgaggatgtcaagtcaagaaagtcggagtcgagttttggccggatcggcagaatttccgccaagccttcgattgcccgttcgggttgcagataacagcgattcttttttctcctccgattctacgataccgatccacctcgttttcttgttcttactttgagggaaatttatcattctatcagctactactctcataccctgcatagcttcatatatagcctctgatcacacatgatggcgcaaatcgccatgagcaggctcttccgccaaagcaccaccggctcggtgcgccagtctattctgagaccgatgcaggcccgcagctatggttcgaactcaggtatgtattaataaccgatctatcgtgttgtcaaattctcatcggaggcgttcggaacagtaatcccaaccttcacctcaacatcctcccccgagttagacgaagccctggagcggttccgcaatgaactcttcatacccctcgctcttcccaagcgacagagaaagagcgtgttcagagagaaatacgccaaacaattggaaaacgagccgattaccgtgaagattggcgagaccgaagagttcaccctaacgcccaagaagcaccacgatctgccatcgaagaaagacgctctcgaggttctcaagttaatggttgcgaccaagaactacagcaaccttttcccgtacctcagtggactccggatgtcaaactatgccatcaacagcgaccggtgggagttcatcattcgcaaaaccagcgcggctagcaagctttcaaccattatcgagtgtgccaagcagtcccatcgcaccggcttgactctcagcaacaggaacattgctcgccgtctgttctttgagcttcacaagacagcggcgaaagcgaatttcgagggagccccaaccgtcaaggctctgaaattggcgagggaggcagctagcctgatggatgctgatgaacactccgttcggaaccttgaggatgaccccaaacaccagcctttcgtcatcggcacgcttttggagctcagtgccgcctgtgcgaaaatcgatgagacccagataggcttagtccgtagctactctcagaagcttgatgcggcctggtcccgaggaaatttccaggacgacgcgtccactggctttgagaacatcgaaagagtcgaggagaaccttgccgtttacaacggcatgcgtttggccctcgagttgcccagggcatcacatgacactgggaatttccaggctcgctgtgataagcttaagcctatcctgatttcgcagttggagaaagtcaagaacgccgatgtgcttgcagacaatgtggttaaacaattgcttgcggacaagcccaaacaaaagatcgagacgaacgcttgagctatgttgtgattccttttggtgttgattgagccacatcggcgtgtataatactgtacttcccagatatttttgagctggctgtgtatttcacaaaaagatatcttatttctgccacatctgatcctgcaaggtgctatttcctgtcagtctcttccaatgaccgtgaacgaaacattttggtcgtagtgtgcagacataataaactagatgatcctcacaaatgcataccagatcggtcatatcagatttatcttacggtttcttccgagtgggaagtgcgagtaaagcgtcggttagggccacaaggtcacatgcatggtgctatatactactatatactacgcctccctcagctttcgataattcaacccacgtaaggtaggtctgcaggcagagatcgctaagtacggctttagcactaagcgaaccaatttcgtcagtttcatcatcagcaccgaaggaattgaggtgaatctagccgatagacgttgtcaccaactgggacttggaggagcccttaatcaccactctattttcgtttgaaaaaataaaatttgcatattcatcagcggtcgcatcatcatgagttcaattcgtgcgtattcatccatttctttacagcatcatactaactaaccgtaggactgtcatcccgatccgaccgtagaatcaaggacggtataggtcgcgtaagcgctacagctaccatacgctattacatagtattacctatagcaaggttatcgctgccccccgtcgccgttcctactggactccgcattgtcgcgcctaccgagagggagagcctcgggatcgtccgaaaacacagcactttatttctttgcggcatcatgctaaccgaatttgataggccacagaagtactgtgttctcggacgatcccgaggctctccctctcggttggcgcgacgatacggagtccagtgggagcggcgacagggacgatgatgcgaccgctgatgaagatacaaagaaaagatttcgagcgaaaacagagtggtgattgagaattggattgaatgtttactgcaatgaacctggggggatttataggagattctaatctctcccgtcgtcttacctagaagagcgtttctttgtttgcattcccttacgacccacctctggtctttgaagccggcatactgacgtgttcgctaacacagccccgttcgagcctttgagaacacgaagcgaggcttcatatctgagaaccgtttgtcgggctccttttgcctttctttttgttgattgaatacagcagtttgaatttttcttccctttttgttgttgtcgaacagagcatttactttcgccaagccggaaatacgacccgaaacaaactatataacaacaacacatgtgtttatcttgcactagaattggttatcaacacgaaaaagccttgaaaattagagagggggtataatatttgatagcacggcagtgtccatcaagtcttccacgaatataactgatagaaagcatacaataaaaagtataagcagtagggtatatagcaaaagtagcaaaacatgacctggacacatagaaatattcgtaagataaaaaggaaatgttagcccagcaactggcgatactctgatagatataaggtcgtgtgatggcagaactgggaaaaatgttccggaatcatgtcataagacaaaaaaataatatcactttccatcgtagatttggtcgggggtgagtgaaaactggcctttctggatctctctcgcatcgacttggtccggcttgacgtatctcgcggtcaaagcaaagcgcaatttgttctcaggtaccaccgaatgctgtattggtcagatttgactttcaatgttggtaaagagtagaaaaccacaaacctcgtagtatttctggagatcctctccgtgcatgacaacaagatcaccatgattaagttccatcttgatggtaactggggcctctcttcccttgcggcccattgccagagcacggcgagagtcatcataatcagattgcgagatctcaccagcatcgaactcctccttcagtgtccgccgttcaccctcaaacatgcagtctttcagaacagggtcattctgcagaagggtcccaatttgcctgggctcagcccttcgggtagagccattgaaatacttatacttcatgcggacgaacatagttgctttcgctccaagagacagtgtggcgatactgggccccagcgaggactcgccgtcatcatggaactgatagaagaaaatttagcacagattattctcaattcacagctctgacttactccgatcttcatttcctcgaaatagccgagcgtcagtagctcatttggaggcaggtatttatctccagaagagatgactgccttctcagttgcccatgacaaacggcccagagcctggagcatgtcattaggtgcttcatcgaagcccttggaatcgacagatacgacatatttgtagggcataccctgtgtaatctcgtcagatagtggacactaaaatgtcaaggtaatgttgtcacttacatagttgacggcgaaatgtgaggtcaatgtacccgcaactgtttcaatgtgagaaatatttctgaagcttggatctggctcacttacctagactggactgaagctgaaatcgtttgaggccaagatcatcacgttggagattgatgaacaggtcgtctggtccattcgcacggctattgatagctttgttggacacaaaatgggtaatcgagccaactccatcaagtttgtaggtcaactttcggtaaggaaagaaggtcttgtcgtcaatctctggagtgttaaacttccgatcaaaaataattgctcgcttgatcggggccaactcgaaatgatcgaggacgactcgaagcgaaacgggcttcatgttcatgaacttttgaaaagggcagcttttcgcacattcctcgccaatagagtcatcatcgcatttccaacctcgccagaaagttcgtcggatacatttgaaacacatagggcacacaattcccttccaggcaatacgagctgtgctaacatccgcggcattctcatccaatgtcaacaaaagatcagggactagactgtagtgtggctggatttctgggtccggaggactgcgaaagctcaggaaatcaggattgaaagtgagctcagcgggaggggaagcgttttcaatcttccagaagtcgacgcaactagggtcaaggcacatccacccatcctcgtacaagcgaatactttccgtagagcatctctcacacttgagggtttcgggctttgtttcaaagtcccgtccatgaaggggcactggtgggagagagtacttggccgcccaccagctcttttccgcgaggttcagtttctcaaagcggactttgactccgtgtttcttgccaatcttttcaaaccagacattggtaacacgaaaccagtccataatgttgtaccgatgcggaagctctcgattgagaatcttgttcttgctccctaaaacggtgattagcggattcctttaaaaaaaaccctgataaattaccaataacaaggccaacagcaagcttggagttttggctggcgatgatgctttggacgagtgaattctccgagtcttggttcttttcgagtgtcaggtttccctccgaatccttggtacagcatccaccgctaatagaagttagtataggcaagtcgttactctgaacaaggaatccttacattcgggtaatgatgatctcctcatcgatataagtgcgggtaccaccgtcagcatcaatgaggaagccataacagaaaccttcattatgatacattgcaccttgggtgcagcgaaaccagggaatagcatcacaaagttgttgccgaccctggcagaaaattcagtatatatccatatgggttataaaagatgactagcagcatacctctgaccaggctggtggtgttccataaaccggctcaagagcttgatcattgacagcaacttgctggtccgatgagactgtccggtatcagtatggtatattcaataataacagtaaaacaaagacattgtcacctttgctggcttgttctttctttgttttggcgatccggcctgttcgcactggtctttgaactgcctggcgacgattgacagtagggcgtggtgccatcttgcacaactgttgtgcaagcaagctagtttgctatgaattaagtaagtattgtcccagaacagattcaaactgccaacagaatcatattcgggagtggaggttgatcgtcagactcacagtacagagggcccaatggcatcatataaggtaaattggtgttctaattgtgctcagtataattcttcagacagtactcagctttgagtaaggatctaatgcttgagagggatgaaaagtgtcagtggatggggtgaagggtaagacgggaggatgatagagctgggtgagggcccgatatatattttgccagagcggcaggggcgaagctggcagtaaactttggaatcacgttacaagatgagctaatcatgaggaagtccattgctgatgataaactttaaagtacaagcaaatggcattatgttaatttgatatgagaaggagaccgagaaccccccaagattgataccacaatgagagcacagatttcgttgctgacagcccattgggcttgtcctaggcaggagatactcaagatatgatcttctcggttacaggtggcttgcatatgaactagatgactggaatatgggctacttgggtaaatgattaacaaggatatgcacgccataacttacttcaactccacgtcccatagcagtagattatgaaaaacacctctttacactagctatgaattacacagaggtcaccagggcaatttaagtttcagaagtgcaagtagaaatgatatggtgattcatgtgttgccacagcacacgatcatcaaagaaccagggaggctgggagtgaacaaagaactgcaatgtctttgttcaccaggaagtccagagctgcctgcatgacatgtgacattgacatcgacagggaaggtgcacggcacctaggaacttgaggaaggtacgtgttcctgggggtataaaaggtctcctccccccatttctcttcttctcttcttcttctctcctccccattcctctgaccaccatctcaccgtagcccccgagacagcgttgacagagggacccgcagtggcccatttgggaaggtacgtgttcctgggggtataaaagggcccctccccccatttttcctcttctcttcttctcctctccccatccctctgaccatcatctctccgtagcccccatgagacagcgtaggcagagggtgccgtagcacatgctgcttgacctaccacagggatcataacattaccttgtttgttatgaggtccatgtaggtctgcatcagatatcaaaccgggcgttctcgtggatgttcctgaagtcgtggctctcattgccatttgacaagtcccacagaatacatgaggggtgtaaatcttcgtagccgaggacgcgaaggtagtcaccagatacattactcattcgtctggtttgtcctatatgttgaagtattatttagtgtatttcgagaatagtgaaatgttattgtctaaatgtgacaagttgtcgtttcattctgtagataagtagataatggcttcaaaaaataaagtgttggcgccgttgaagatatcccgggagcgaaagcgggcgaatgggattcgagtgatctgcacgccaagcccacactttaaatcccacgaggattctgctgtttattgaagtttacgagacagagtgcttgattgcttggttttcgggaaaattagggcttgccattcatcgtgaaccagatttacacctagtacatccttggcagctgaagttgatggatacatattgatgataccctcggatacgtatagaccgaggcataaagtactagcggcatcgtgtcgttggagaacctcgcaggtttgccgagcttccccgcatccgtcacttttccattaaatctcccctcagctgcttccaaggttattgcctagtccacgtgtgttcgctagaccccttgtttattcgcactgccatatatatcaactgtgggtaaaccgtaagaccccattgcgctcacctggctgcagctaacctcattccaaaaatagccgagaccacgtatatcatatcgctgcaactccgagaaactggaaaaatggtgtttttgccggcaaaggatgcgggccaattggagccaatccctgacactatcccaatcagcgagttcatgctcaatgagaaatacggacgagtgccacacgcaggctcccgggacccatacacatgtggtctcagcgggaagtcatactcgtcgcgtgaggtagctagtcgcgttgactcactggctcgtagtctttcaaaggaatttggttgggcgccaaatgaaggatcggaatgggataagacactggccgtgtttgccctcaacactgtaggtgcaatatacaatagcaagaagaatagaacggagcttattctttcgtcttgccattagattgactccttgccgctattctgggccgtgcacagactaggtggtgttctcactcccgccaacgcctcatactcagcctccgagctgacacatcagctgcttgattccaaggccaaggccctggttacttgcgttcctctcctcgccatttcactggaagctgcggccaaagctggtctcccgaagagcaaaatctacctactcgatgtacccgagcagattcttggcggcgtgaaacctccaacagaatataagactgtttccgaactcatcgaggccggaaagtctctaccgccggtggatgaactgcgatggagcgcaggtgagggagctcgacgaacagcattcttgtgctactcaagtggaacgtctggattgccggtaagcagtgcccccaacaacttgaataataactttggctaatcatgtgctgcaaaaaaaaaagaaaggagtgaagatctcccaccgcaacgtgatcgccaatacccttcagatcaaggcatttgagcagaaccatcgggatggcggtggcacaaagcccgcggacacagaggttgctcttggtctccttccacagagccatatctatgctctcgtggtcattggccatgctggcgcataccgaggcgaccaaacaatcgttctccccaagtttgaattgaaatcctacctgaccgccattcaacactataagatcaccacgctgttcctggtaagcatgtctttgctgatgagaagctgtcgaatgctgaccacaatcacttaggtacctccgatcatcattcacatgctgggcactcaagacgtgtgctccaagtatgacctgagctccgtgcggcttttgttcacaggagcagcacccttgggcatggagacagccgccgatttctccaaattctacccaaacgttttgatccgccaaggatacggtatgtggcattggcacttcttacagatacagagccgaaactgatattttcacgcacaggcctgacagagacgtccacggtcgtgagctcgacccacccgaacgatatctggctcggttcatccggtgccttcctccctggagtcgaggcacgcctcatgacgcccgaaaacacggaaatcacaacgtacgacacacccggcgagttggtggtccgaagcccaagtgtcgtgctaggctatctgaacaacgacaaagctaccgaagagacattcgtggacggatggatgcgtaccggagacgaggctgtcatccgcgtcagcccgaatggcgtcgagcacgtgtttatcgtcgatcgcattaaggagttgatcaaggtcaaggtttgtgatgccactggctgatggaaatgttcgcagtctaacacatcattcctagggtctgcaagtcgcgcctgccgaactcgaggaccatctcctcgcccaccccgatgtctcggattgtgccgttatcgccgtcccggatcctcgtgcaggggaagtccccaaggccatcgtggtgaagtctgccaccgcaggatcggacgaatcagtcacccaagctctcgtgaagtatgttgaagaccacaaagctcgccataagtggttgaagggaggcattcgatttgtggatgcgattcccaagagcccgagtggtaagattcttcgccggttgctccgtgatcaagagaaggaggcacggagaaaggcaggtagcaagatctaaaaagtttcgggatggctttgttggaaacttggaagaagcgccaagaaccatttcggtttagaagtatatacgttcacgggtagatagttcacaatcttcaatataatagcttgttgtattgtactatttaccgatagttattaatctctgttatgtaagtttaagatgacgagatcactggttcttgaagcccttgagattcgactgcctcgaggcttcaagtatcatttaagtggccctgaatgataatatagtatttcaaagagtaagtaacaaagctttcaagccacttggacattgctatctccctgaggggcctctcgagggactgcctgagggacttcctggggggctgtctggggagctgtctggggaactgtctggggggctgcctgggctgtctgtttgctcaggatttgatcaactgcagctgcaaggccacggcacagcccagaccaggacttgcgttttgagaaaatctggctcacctcggacagcagacgcaaggagcttgctttgcctgtcagacttccgactccaactaggttgagcggagtgtttgggccttcggcgatccaaatatgaatttccctggtgtctaacaagcgaatctccttagttggggcatccggctttttgatctcaggatcgaccacgagctcgtcgaatgcccatatatagaagaaagcgataaggaaacagagaggatcatggcaggaaaatttctgcttggctttcaatgtgctgtaaacacatacagcatgccacagacatttcctggcactaggtgcattgttttccatccaatgtttcaggatacttgttgtcgtatcgacctcggcttcctcgccttgccaccctgagaatgactcgagcatctgaagtgatacttgccggagaagagacagtatatgatgaatgacatctcgagcggcaatatagtctggtttggctgaggtgggaatggccgcgaatatctcgttcatggaccgaaacatcattgcgcgcagagcagaaggggttgatgagatatggtcccatcgctcctgaactggcacgccggtcacttgagaacttaggcccgatttccaaatggaagaatacgacattttgtcaaggaacagtctctcctcgctgtaaagagacagcatgtagagatttcggcggtaagcatccattcctgccatggtttcattggcttttctgacatcaagttgagtagatggaggttgtgatacatctaaaagttatggtcaatcccggagatatctgataacaaaaattggctcactttgatcagattggtatacatggacgaaattgtcggcatttctacgacaccatagtgattggcgacaggggaactcctcggggagttcatgctgcccaaatatcggctgacgatcaaataaaatgagctgaagacattcgagttctggcgaatggttagccaggctttcatagtttgtcgcaaggggcacatacgaaagatacaatgaagtaaacgtatacgagattctcttgccagccaggctctccactgtctcggggcttgtgacgtttttgttttcatgcattgatcaaccttcaagacacgggccaatgtgacgagtacatttcgctcatattgcagcttcaactgcgctttgtgcgacccgccaaacatcaggcagacatcactaagaaatacgctttgtgcataggataaagttgttgtttcgggtgattgaggttgctaatttgattaatataaggtacgaatcttcaccaggagatgaacttacgttttgtgctattgcctgacacaatatgtcgccgaaagatgctgaaaattgactggcattgccgaaagcgctatactgactcccaacagtgaccactgctaaaagtaccatccacgaggttttgtcatgcccaaattctagagcatatgggtgaaccacggggtattcatgatcgaagtgttcaaaatacaagtgcacaaagtcttggatgaccctccaccatggaaatgtcgcatcttctgtttctcctaggctcacaagaaatgccttaagtgattcatatattgagatgttggtcatcacgctgtaacgaaattcaggcaacaaaaatcgctcatctgaacgccgcatttttggaagtgacaatttcaactggcgggttgacttagaagggctggctgcagcaggagccgcaggggcacgagcacgaacacgagaacccggagccgaaacacgcggacggccccgtggacgaggagtcttgggaggtggtgttgcttgcgatgctgggccattctgatcattttccgagtcgtccgatatttccatgacatcccgcgaggcatccatggggtcctgtgtagtgaggtctgtagcaggcacggccggacctggagtagtctggtttgttccatcttcattcaatgagaaagatgatgtacgtatgttagatgaggagccctggtcttgaatattctgcggagataaaggactcgtctggtcagactgctcttgttttatatcttttccttcatggtgtttcctcaaatgagccgcaagcctatgtctgcgggggatcagaattggaacgtcgtatgaataggaagtgcctgcagcctagagactatggcataccttcgagtataggaccttggacaaaaacggcatttaaactctttcgaccccgagtgtccccggtcatagcattgttgtgacagtgctgtgccgcattggtcacaagtaagatggagttgcgggcgagtatgagttaggatatggcgtttcagatggtgtttacgcccgaataccttgtcgcattgctcgcatgggtaagactcctgcaaggggttcatggcttcttcccactctgaagcacatagatcaattcaaaaaatcaatgcaacctgcaattaaacagtctacaaccaggactgtggccatatattcacaaaaaatccagtaaatccagcaaacacctaccacgacgctatttcgcgtgtcgcgctgacaccaaagcggtcactaaagcggtaagagacagagcataatctgccgcggggtgtggatttctaagcggggaggtaagaaaaaaagatcgagggcattttaagttgccttaacaacctacttcttgcttcaagattgtttaggaacagcttatatcagaagggactgttaataaatcactcctttcgacttcatatctttcatatcgcaccgatccacggattgaaaaaataataatgtcttcaaacgacccgcaccacgagaatgaagaggactatatgcaggccgacgatgccgaagagatctttgagcgggatgaggatcaccctatgtcggagggagaaggagaatatgatgatgagaacatgaccattgaagatgagatcaccttccaaaacgactcagtggcacacttcgactcgcattcagactccgtattctgtgttgcgcagcatccggttcacaacaatatagtcatgaccggttctggtgatgacacaggctacatcttcgattcgacccctgcaccgcgtccagtgcttccatcaagctatgaatcaaaccctcagccaaaggagcgcgagtctctcgcgcctctggccaagctcgacggacacactgacactgtgaatgccgtgactttcaccgaacccacaggagagtatgccattacggcaggtctggatggcaagctgcgagcttatcgggataccacaccccagaagaccggactcgcatgggagttctttggcgaggtccaggaagtggaagagatcaattggatggccgtgtgcccctaccagcagggaaatgaagggactcaaaatgttattgccatcggcgccaatgacggcagtgtgtgggtcttccgtatcgatcataccgaccccgggcagcctatctccatcatccagaccttcttctcccacaccgaatcatgcactgcaggcgcatggacgcctgatggaaatctgctggcaactgtttctgaggacgccagcttctatgtttacgatgtctttggagctgctgccgccgctggtatcgagtattcccaaggcactaatgccatccttggattgactgcggaggatcagcgcttcgctgtggagggtggtctttacaccattgccatttcccccagcggcggtattgctgcagtgggtggtgctgagggcaacatcagggtcgtcggccttcctcgggtcacagcaagtgtccctgcagccaagggcaagggcaaaggcacaccctctcaggcagccggttccaccgctgcaggaactatcatggccgcattgcagacccaaacggacaacattgagtcactgtcgttctctcaggccccattcactcttcttgctgctgggtctgtggatggttcgattgtgatgtacgatgcggctcatcgatttgcggcccgtcggcacattcgggatgcccacgagggaagcgccgttgtcaaggttgagttcctgcctagcagcaagcaactcggtgcaactgtctcagggccccttgccaatgctcccgcagcccaccagaaccgctcttggatgctcacgtctgtcggtctggatggtgtggtccgacgttgggacgcacgtggcggaactgccgcggcttcgcaaggattgatgcaggagtggaagggacacatgggtgccacggaaaatgatgagggcgagcaagccggtggcatcatgggctttgtacaaggcttcgatggaaagcgtattgtcactgccggtgatgatggtatctcgctggtattcgaggagtagcctgcacaaaaaaagtttgagaccccaaatgcatagtgggggttcatgtcgataatgatattacgtgtttatagaagctcacagccaaaccaaccttgataaacagctcatgatatacaaggcaaaatccctgtagagtcgatgaccgatgatcgaacaataaagaaacatggttgtagtagtggaacaaaagctatgtacattcgacaaatcaaacccaaagcgccatctggaagctacgctccgtatgagccatgagaagctgcatctccgccctgacgacaaaagcccccggacttggcaaagctgtaggcgctataatccaaaactcggctgtggttctcgcggaggcgagacgactcttttcgtcgcctggggtatagatcctccgctcgataatccgttggtcggcggcattctcaattggtctccagagacgacccattagtggtgctcttcaccgtggtgagcatcgccatggtggtgatcatccttcatgaagaagtgctcgtatgtgcagtagccagcgaaagcgacagtcgcgataccgaagccggggaagagacccttgaagcggttgaatctgctgaaggggccgcagtagcgccaggtctcactgtaaatattagtgactaccacaattggaatcacatcggcatcacttgacgtacttgcgagcccatggatcccgcttggcccagatggaagatggggaggccgcggccttgtagtcggccatgttgaaaccggtggggttgggggcgtgcattgtgggtgttatcgggtagtcaatattacttaaagacggaaataaagagaaacaagatgtgagagactgcaaattggtccctaagtccgcaatcaaccgcaaagtgacacagtgaggagccgaagatgaggaaaagaggtgtgcttggcaattacccgcgctaaccgaatacggtacaccaagtagctctcccgccttcgagggacgaaactgtcacttcatccatgcgcatcttcgagacaacaaaatgccacctcccgttggcagatatgggccatctggcttgaacgctccatacaacatacagcaagctcaccttcaatctcaacatcccgcacacgcacagtctgggaatacgctacctcccccttcgcttggtcaccctggcttcgcgggcaatccaaataccaacatcaatcctttcacactatccggcggaattgcaaatggtatggcggtggccggctttccgggggctggtgcaggtgatggtggcggcaccggtctggcgagtcatgcggcacagatgggattcgcgcgcggtgcgcaaatgcaacaacagcaactacaccagggtcacgacggtcgattagcactcgaagcaaagggcgctgcggtaaagtcaaggattagagatgtttggaaacacaacctggcccatgagatggcggttctgagacagttggtcgacaagtacccttatatcagcatggtaagcaccactacgtgatccgtgcgaaactgaagtcttctgagagtaacgtttactgactaagacctaggataccgagttccctggtattgttgctcgtccgatcgggtcattttcgaacaaagcagactaccactatcagaccctccgatgcaatgttgatctgctgaagatgatacaactaggtatcacgttattcaatgatgaaggagaggttcccccagcttcaggcaatgatgccaatgggcaagtatatggtgtgcccgctccctgcacatggcagttcaacttccgattttcactagaaggagacatgtacgcccaggagtcaacagctatgcttgctaaatctggaatcgatttcgccatgcacgaaaagaacggcattgatcctttcgagttcggtgctcttttgattagctctgggttggtgctgctagatgacgtacactgggtatcattccactccgggtacgactttggctacctgatgaagatcatgctctgctctcagctccccgaaaacgaagaggagttccacaagcttcttaccatcttcttcccgtcactttacgacatcaaatacctcatgaagcatgccggtcgcaatcaagccgtcaacggttctcctctcacgcaggcggcagcacagattctgaccaatctaggccagaaatctggtttgcaagacattgccgatgaacttggcgtcaagcgtgtcggaatcgcccaccaggctgggtcagattccctagtgactggcgagatctactggaagacgcgccagctcattttcggaggggaaatcgacgacagcaaatattccggccaaatctggggcctcaacggacaaatgcccgcagtggcctacaacatggcccagcaaacgccgaacctcaatggtgccaccatttactccggcggaactcccagcactcccaatactgggtctcacggagctggcgctcatacacctcagcaccacggcgctggctacaatgccccaactcccggagcctatcaaatgggccgggtatgaggcacagtctgtgtagcacctgggttgatgtgatatgatgtatgtacatagacacgagaacatcgtgttattttccttcgatattcggcattgtcttcgcgcatattactttgcatgggctctctgtctgtgctaggttctgcgtctagacgacggtgttgggcaggaaggtgcctggcgtttgatatggctggttttgaatccatttacgaggcgttgacaggctctattatggccttgggcctttcgttcttgtgatctacgtcgctttttgtttctttcttgttgtagctagatcggacctgtctgtgtcctatgtataggaatcatggtttctgttcgctcaatttgcctggttttgtagatttatgagctccttttgcctgtccatatctagggatctgctcggatgagaggtccgcagttgcagatttaattgaggccaagcacacgttcccaattgaggattctcatgcgacatgcctgttttctaccccgcgatgtgacaaacgacatgaataacgcatagacgatagctgcagacaagcatctctttgccgttttgggattggagataccacgctaaccccaatcaggatatcagatccggcctccgcaaatatctatctaatcgatagaggtataactgcagggctcgggacattttcgagataccacctgcttgttaaatagctcgcaagcccagacctggaggagaatcaagtgagttaattgtgttcaactcttcagcactgcttgactcgaattggcactttaccctcatcaccttgaagtcatctccttccatatacctctagcacagcatggttctcgaccgactacaccaattgactcaccaggtcagcgctactgcaccgccacctcatccacttgatcctctgtctacggtggaaattgatgcggctgtcaacattgtccgcaaagaacatggctcgctcaacttcaatgcggtcacactatacgagccccgcaaggcccagatgatggcctgggtggctgatccagaaaatgcgcctcgtcctagccgagccgctgatattgttgccattgcgcctggtggtaagatctacgatggtgtggttgacctggaccagaagaagatcatcaagtggcagcacacaccgaatgttcagcctctgatcactatggaggatttgcaggaggttgagcatgttgtacgcaaggatgctaaggtcatcgagcaatgtggtatcattggaattcccaaggaggatatgcataaagtatactgtgaccgtaagtggacttccctcgtttgtcaaagattgatattgaccaaatggtattatagcatggacaattggatatgatgagcgctttggaactggtgtccgtcttcagcaagccctgatgtactatcgccctcacccagacgactcccaatatacctatcccttggacttctgtcccatcttcaacgccgagaccaagcagatcatccacattgatgtgccgtctgtgcgaagaccgctcagcaaggcgcctccaaacaactaccacccggcctcgatcgaaaaagaaggaggataccgaaccgatcttaagccaattcacatcacccagccagagggtgtgtctttcgaggtcaaaggacgcataatcgaatggcagaactggaatatccacgtcggcttcaactaccgggaaggaattgtcctgaacaacatcacattcaacgacaagggcaatgtgcggcctgtattctggcgtctttcaatggccgagatggtcgtgccatacggcaacccggagcatccccaccaacgcaagcatgcatttgacctgggcgagtacggcggtggatacatgacaaacagcctgacattgggatgcgactgcaagggcgcaatccactacatggacgcagcattcgtcaaccgggcgggcgctagcacaatcatcaagaacgccatctgcatccacgaagaagatgccggcatcctattcaagcacaccgatttccgcgacgagtcgatggtcgtaacccgcggccgcaagctcatcatctcgcagatctttaccgcagcaaattacgagtactgcgtgtactggatcttccaccaggacggcacaatccagctcgagatcaagctgaccggcatcctcaacacttacgccatgaacccaggcgaggataccaagggctggggaaccgaggtgtaccccggcgtcaacgcccataaccaccagcacctgttctgtctccgtgtagacccgaacatcgacgggccgaacaataccgtcttccaggtagacgcagtccaaggacccggtgaagtcggcagtgccgagaacaagtacggcaacgccttctacgccaaaaagacaaagttctccacacccatcgaggctatgtccgactataacgggtctaccagccgttcttgggacatggccaataccaacaagctcaacccatacagcaagaagcccgtcagctacaagctagtcagccgcgatgttcctccccttctccccaaggccggcagcctggtctggaagcgagcaggcttcgcacgccatgctgtccatgtcaccaaatgtgagttttgcaatttcccccttctgatatcgtgttccttttctgacttcattctctagatgacgacgaccaagtccacccagctggccgccacgtcccccagacctccggtgagccttcggagggtctgccggcgtggatcgaagctgctggccccagctgctctattgataacaccgacgtcgtgctctggcatactttcggtctgacgcacttccctgcgccggaggactacccgattatgcctgcagagccgatgacacttctgctgcgcccgcgtcacttctttgaccgcaatcctgttctcgatgtgcctcctagctttgcgcgcacacccacgcaggtggctgctaatgcgagcacatgtgcctgcaagaagaatgatggctccagtgttttggtttgatttgagattagacgttgatttgggttattgattttctcagcgtgcacttcttgtatatacactttttggcaaacgaaaatgattactgattcttgatctactttctgatttgcgtgcttttatatagcaggtactccgtagctgtgggcaattagggcaactaactatagatagcccactgcggccactttatctcattgatatttcaaactcattcagactgcactcgtaacaaaaaaaaaaaaaaacggagaaggaaagaagttgtaatgtcttttaatacgagaacagggaaatccagagatatgcatatcagagtataaacctcgcatgaacgcctcgaaagatcccaacaacaagggaatcatgctcagaaccaagtaaaccataaaagcctcgacacaatgcctagccaacacgcagaaacaaaaagggcagctgtgcaagagaaaacaaatacacggatagagcaatattctatgcggacaatccccgcaacaaagccctatcaacctccccgagcaaggaaaacaactccttcccaccctccgaatccttcccttcgatatcaagcgacttatgcaagaacctgcgcgcctcctcatagcgactcatttccgcaagacacttagcaatccgccaccaagccttgacattgccaataggcttcgagtcaacactagccttggcatcaaccaacgcgtcaggccaggcctgcattgccatatgggcctgtgcgcggttcgcataaaggccggacaactcctcgcgcgcaacgcctataggctcccagcccggccggctcagcgccatgtcgatggcgtacgagtatagcttgattgcttcgtcgtagttggatttgcggtgggcggcgttggcgctgtcgcggagtttgctgatctgcgcgctgcgcttggggtttacaggcaggggtgggggtgggatgttcggggggtcgaggctgattagggcgcggtgtagttggttgagttcttccagttcggcgttgattgcagctgtttgggagggtgtttgtgcggaggattgtggaagtgagagcgctttggtgctggggtccatgtacaatgggtattggttgtagatatcgatttcactggccattttggggcgggggagaccgtaggtctcggttttggggttgtaaggtcggtgttgcttcttggagttgttagtatatgcgctgcggtgtgcctgagcgggtgtttggggtgtggaatggaaaggtgtcattgcggaaagggttaactcatacaaggtatagttcaggatacgctgtctagttgttcgacaagcaaggttcactatgaggtcaatattcgtggttgtacttgtcaagagatgatgatggcaagagggcaagctgtccataaacccgctgataggaaaggcggtggcagaataattgtaccttgtagagcaggtaatagaaaggtgaatactactatggcttcatactgaccaaaaaggatcttgtttgaatatattgacaagatatcagccttcgagatatcatctacgtacgttgttgtgtatcaaagtattttcacctacaaaacacagagacatgattcacaaatgcaatacatgatacatctatatattgctagctccaatgaaacaaaagcaggacatacaatcgtaatcccagtgccaaaaaaagctcgtgagaaacacagtaaagacggacatcagcccaaagtaaacagcgatgcgccaacaccgcgctccatggtcaatattcaaggcgcaaaaaaaacaagacgactcatcaatcatccgggtatttcactgaaatatgcctccatgtacaccgacaacactccttactcaactcgcgtgccgtccgtacccactcacagatgagccaccaaacccagtatgagcggtgtattcagacggggtgtattccgacggattgtaatgagtagacggctcgtactgactagatggctccacatagtgctggccatgcgcaccaccgtaaccagtactgttataatcatggaggacgcctccaggggcggtagcggtgggatcgtaggagccttgcatcgcggtccggccgtgtgcgttgcctaggtcatccacctcactctgatgcaggagggcatagtcctcgtcctggtcgccgagggtcgatgggcccatgttgccgcctcggccggagcggatatcgtcctcgtcctcttcgaagtcctgggctgggttcgatgagaaggcggctttgctctgtgcggcaaaggtgggatcggagacggcgtcggggagggtgccggtgcggcggaagtgcgtgacattgcggaaggacatccaggaggtgatggcgaagaggacgctttttgtatgttagtttcaccaaggaatcgttggatcggcggaaggaatgcacgtacaagatgaaaacaccgataattgtagttgcctcgctcagcttgcacttggcagcgctgccgtatccccagttatcgcatcccgtcttggtggtgttggtggtggtagtggtggtcgtatcatcggctctcttagtagtagtcttctcgtcgtcgtcggtggtcgagcccttggactttccttgggcgacataggaagcgagacagatccacgcactgagccagagaatcgaataaaggatgtcaacacaggcgaaggcatagacgttaccgaagcgtcgagctcgtggccacatgggcactgctactagatagaccaggccaggaatactcaaccagcactgccatgcggtcgtatgtcagaatgcaacttttttttgtatcaaaacgcaaaactcaccaaaccccagtaccagcctgtgcgcccatctatgccatctcctttggtccagatagcgatggtcaaggcccatgcgaggaagataataaatccttgtatgaaatgtattatattcttcgtccgcccgaggctgccgcctgacgaccgcacttgaaacatgtcttgtgtaggagcgctgcaagggtgttgcgctttttgtattcggagggaagggagtggttggtgtcgtctatcgtgaagtcatacgggtcaaaaaagatgagagatgagacaaggctgaagaatgagacccgatggggtcttggcctggctgaagctccgtggagttttgttttgtttttgttttgttttccagtcgcaacgtcgcaactgtgcgattatttagatcacaacgatggatatatgtaaattaaggactttagatattcaatccgattgatttgtctctctgccccatcctcttatttctacagggcgtacgtaagtcctccacgtccgctgcccaggcgacagcccgttactattttgggaacttcgccacactctcttttggcttatgcgtatcattttacatcatagtctcgtttctcgtatactcatgttaacatacataataaaggaaaatcaagccaaatcaagccaaatcagtcaatcccgcctctcgtgttcgttttatcaacacccagatctcccgtaatggttgatagacatgtacatgccaccaccagggaaccggatcaagaatagagaacagcggatccttccagaacagcagctgcactatttctacctctgcaacttctagagctgtgagtgccatgcgaaagaccggaaacttcatgaaagtagcaggaataatggcggcacgggcaaatgctggcgctgaatcggttgatgacagtgtggctgtgacattggaagtatcgactcgattggatgggagcacagatagatagcctgaaacggggcaaggtacattgtatagcggatgatccacaggtcttgcgccgagtgtacagccggcgatgtagatagcgtgtcggacagaatgcgcctcaaactcttcatcgaccatgagtctgacgcagagatgacccgtcaaacgaacatcacctttggttaccaatttctgcatgaggctatggatcgaagctgccagagccttatccaaacgcgatgtaccccacgtaaacggaccagaatccgaaaaccgaactctaatggcttgaacgtggccacgcacaatcagtaggtctgcgaatagctctccaagacgagattgttgctgcagaatccaaggctggtccttggagatctggatctcgctgatcgccgagtatgttttgctcagcgtagtgctcggcaacagtatagccttctcactcgcagatgggcttgctcgtgagatatgataggcctttgaaggcgaccggtgcaaaatcttgtgcacagagtcgcgcgattgaaccctgtgatgctcaagcaccggaaggcctttctcgatcagatactgcctgaaagaatcaggatggccgaagcgaattgcgcaggtgacatcgaaggtgatgcacgtgcagctagtgtaaccctcaatgagctgtcggaccatcgcatcttccacgggggatgccttgggcgaacacggaatccatatgtcgacattttcgcggtggataatgtcagcgacccgggacatgtaatggtccttgggaatccggtaaaatgccaccagagccttggacatgctcccaccggagcgtacgggcaggtccaggtctgtaatatcggctccaaccacgcgatggccttctagagcccaagaccttgccagagtcagaccgtgggctgtccctatgcccgtgataaggactgttttcggggaaaagttctttgaacgtcgagtggctggtcggagataggctatcaataccgcggccgcgagaatgatgttatcgacaaacaacagcgataatgaaaggcatactcgaaggatatgccagaatactcgtgacatagtacccgataaggctaaagctttggcagatttaatcgacatgctgagtctgagtacaataatatcgaggattatggacctcgaatgagcagcctcgagtacttatagtagggcattatcgctggcaaggcgtcgtcgctggcaaattgtggaactgtcagttggaggggttggcaccactgaaggcccgtgaagggggggggggttgggctgcagatctagtgccgtgtgacgatgcatttttcgcgttcaacattccagcacttaaatagttcaagacccgtaggaaatccgtagaagatcaagacctctgtacaaattgaccaagagcaacctacaggtacatatatgcatgtaggtaacgtgcgtctcgggtctaaccgcaggatgtccggcgatcacatgcgatcaacgtgggatcaggtttccgatcatttcccagttgtctcggcgctgattccctgaagggatatctccgaggcgcaggagcttggcctgaaagggtaacgccatcgactggtgaatggtgaattgggcgtggtccgactcggatttactgtctctccccgaagtattccagttatccccgaggccgtttataaggtcgcatatccgcatggaatggattgtttatcagattccgtctagtttactgcacgtcatgtctcaaccaggtcccgcggtaggaattgctttttgattagattgagaaatgaacgctaactcatactctagagcgacgccggcaaggagctgaagctcctgcattacatctatgaacagccaaatctggatgaaatccgcggccatccccaaaaggtcctcgatctgattcacgagtttgagaaaaactaccattttatgaacgtcggcgccgagaagggcaaagtcgtcaccaaactcatcgatgaactcaagccaaagaccatgatcgagctcggctgctacgtggggtactctgcgattctattcggcgacgcagttcgtcgaaacggtggcgaacgctatctgagtctagaactgaacccagagttcgccgcaatcgccaatatgctcatcgagctggctggactgcgtgactttgtgcgtatcatcgtcgggcgaagcgacaagtcgctgcacaaactactcacctcgggcgaggtgaagaaagtggagcttctcttcatcgatcattacaaaccggcgtacaccacagacctcaagctgtgtgagcatctcggggctattgtgccgggttcggtgctcgctgctgacaatgtcatctacccgggcaacccaccatatctggaatacgtccgtagcacggtcgaacagaagcgcgaagcggcgaaggccgggcctgcgcaggcgtataatactaccgggatggccgaacgcacggtagagtcctttgtgggtaaagatgacgtgccgactttccagtttgtcgggaaccccaacttaatatatgagagccagctatgtcaacccgagggattgcgggtatgtttgcatgaatccccgagaaatttccgtcgctaactgcaagggtaacaggatgctgtcgaggttacgaggtgcgtgggggtgcaagaggcttagatggcgcatagccaatgacgcaagtgggatgatagaggggcagaagccaagatgtcaagaatagaagaagaatacggagtacccgtggactccatatgattatcaaacaggcgcagagtgctccgagtagaaagttgtatgtacagtcgaccattacccacttcatcggaaccggtaccccatcggaaccggtgaaccccacccgttgccgccaggaccttcctatgtctccgctgaatgaattccgggggccctataaaagggtctcgatacccactgattacccctcaattgaatcacaatcgatatctcatcatggctaagacttacaacgtcggtattgtcggctacggcttcagcgcgaagatcttccacattcccttcgtgacggaggttcccgagctcaagctctacgcagttgtccagcgcacaccgaagcaggatgacgatgccgagaaggaccaccccggtgtgaagtcgtaccgtagcgctgaggagatggtccaggaccccgcagtcgacgtggtgatcatcactactgcccccgactctcacttcgcactgtccaagctggcactggaggctggcaagcacggtagatgcccagaaatcccggatatcagttggtatatatactaacgtggaataatcagttgtctgcgagaagcccttcacccccacttccaaggaagcggatgaactcgtcgcccttgcaaagaagaacaacaaacagcttgccgtataccagagtatgtctcgtcacctagcttatccaaacctctactaataactgcctagatcgccgcttcgatgccgactacgtgaccctctccaagctcgtcaagaacggctcattcggccgcatctccgagtttgaaacccacttcgaccgtcaccgtccagaggagccggccaactctacctcatggaagaacaaggtcatccctggtggctcagcgatctatgaccttggaacccacctccttgatcaggtcgtgcatctgctcggactgcccgcacgagtaaccgctttcattggctccgcccgggagcacaacacgacttcatacgaggactccttcaccgttctgctgcactatgccaacggcagtatggttaccgccaaggcgactgtggtcagccccgaggaagagcagctgcgcttctgggtgcgcggtaccgagggtagcttcaagaaggtgagagcaatctactcacgtagatcactgcgatgtaaagaaatgtgaatgctgacctaattgatagtaccacctcgatatccaagaagatcagctcaaggccggcatcaagccccaggataagggatacggtcgtgagcccagtgagcgttacggtactctgacaaccatcaaggacggcaaccccgtcaaggaggtggttcccaccgtcgagccccccacttacaccgagtactaccgcaagcttgttcgcggtcttggtggcgagggtgaccttcctgctagcggcgcggaggctgctcaggtcattcgtttgatcgagttggctcgtgagagttccagcgttggacgtactttggacgtctaagctgtttatgcaaataatgattatgatatactcgataaaggcaaccttgaatatacagtgaatcttggatatagttctttgactccaatacacatcatgaatacccttgcagtcggaaaccaaataattagcgttacgcaaagcatctcgacagccaaaactattgatgtctaataattcgtcttcgtttagatatacatgttcatgttcatattgctgcctaacaagggcctggatgcgcaccgtcacatggtctgcacgaggggtctgagcagattttctcttcgaacgggaagctttccaacttgtccctgaaggattgaatcttgggctaagagatattgtgatggacgtcaaatcactaccagagtttcgattcttcccatatcccaaacatccatccgagtctcaagaattactaccagatgatccaattaccctcaacacttcgtcctcatggacttactgcggacccctcttgacccttgagtcatatagcctgccatcatcctttaccacctgggcagatgccacaatcaacggctcaatattgccctccttattctccttcctggcatatgtccacgaattcctggccaaaaacaaccaatcccactactggctcaccatcagagcaagcaaaagctcggacgagttcgataccccacgctggcacacagacgatttattcttctcccccctccaaccaagaaaccattcaagacgtgaatcgctcttctcgccaatcgctaatctactcaaatcgccttggacaggctcaacaaagaaccaaaagcccaaaccccgaatcttaccctccaaaacaccaaccaagcatcacgatcacccacgtcccacatctccaaccgcccaaatcccctctacaagccccgccccaacaaactggaaactcacaaccaccctcctaggccccggaaccatgttcatcccaccggcgacgaaccgcctagcccgcaccacacaacaagccgccaaaacagccgcccgcgccgcagacccagaccacgtatgtgtctccgtgcgctgcgtcgggtgcgccatggcggccgagtcggtgcgggcacggctggtcgttgagctgggtgggcacggggttgtgcaggcgtcggcaggggagtgtgttttcttccgggttggcgaggacgatggcgcggtgcattctgagcctcggtcgcatggtgatcgggtttttgttaatgttgtccctggtcatgaggcggatcttagggcgctgatggtgaagtgggggatggagtatccgcggacttggtgtgtggggttgccattggtgattggggagggagaggagtgtttgagggatgttgggggtgagatttgattgttttgtttatgataccctggaagacatatctctattatttagtatagacgggtgctctgggcgtatatcgcaatagctgggaggtatgagtttaaggcagtcaattgcattcttttaccctagtgatggtcatttcagttgcgttgacccaagaatagccttaagtcttgcacgaagatccggctaatgacgatatgccaagccgctagtcccaaatcgtagtttatgttaccaaatgcaaatccactgagtggacgagaaattagacctggcatcgaccttgggagactcgatatccgcggagaaagagagaaaggttgcgttttagaccgcagaaggaatttctcactaagggatagcggtatgcggcggataggggttattcctttctattcccgacaggggtgaatccaacatcgagatgcgttacatgggatttggtgaaacccaccagagcctacaatatagagcatattgtgcccatcgcataagtccagcatggcgacatccctgcgtgaaccgatgacgctatcccgtccgacgacctggaatttcgatatcgatcggtatctgaatccctttgtaccggcgccacgatggcatctcgtgccaaggcctgttgcatatatgctgggatatcgggatagaccacccaagccactgggcaatatcgtggtcgccttttgggcgtcgattggagcgttttgcggggtggccttggtggcatctgtttcgaaacgggttccttcttttaaagcgcacgatgcgacaacgatccttggcagttttgtgagtcatggtctaatgcgagagtagtggaacaagaacaaccagggctgacttgatgtctctttgatgatgatagggtgcagcggcagttattgaattcggtacgatcaactcgcccttggcgcaaccacgcaatgcaatcctgagccagatcatcgcttgtttcttcggcgtcggaatatcaaagttgttcgccttggacccgcgtgctgaagcgtataccgagctcgggggcgctcttgcttgcgctcttaccacggcttccatgctccttaccaatactatgcacccgccggcgggtgcgactgctcttctggcagtgacgcagtctcagactattgctctgggctggtttctgtttccggttgtgttgcttggagtcgcgcttatgcaggctgcggccgtggtcattaataatgtgcagcgtcaatatccgctgtactggtggacgtcatatcctctgtcgcctcggggagatgtggaaaaggctagtcgaaaggaaagactagagacacctagtgaagatagtctgacgggtatccctcggcggctggtagtagaacagagtgaagtttcggtgcctgatgggatattgctctctgccgaggaggaagatgtgttggagaggatccgtaggagactttgaggggaccatacatatcaaacctcagctgcatgtaatctctccaaatataagccctctccagggccctgtttcacacaaatcaaaagtggcaaattgacacctcaggcaccaaccgcggtgacgtctctcccaatcagaactgacttatcccagcggcccaccaatggatttttttttgttcaaacgtccgtgaaatccttgaacttgccaactcactcctctcggccaaataattaaacttataaagtgagaacaggtcagttcgactctcaatttcttattttctcccgtttctcgactgacaatcgataggattctatcgataagggcaaaccaccaactccactgctcgacgcccctccatttctgtccgccccgccagacgatccactcagcctttttgcatttctcttcaatctctttctgcattgtcatcctttctcctttccctccctttacctctccgtcgtcccttatttcatttttaaaacccatttttttataccgtcacacccgcaaccatggtttccgcctcgaaggctgcccgcatggccaagcgtgccgacgagaagaagcccaagaaggtcaccaaggtcgagctcgatgcccacggaaacccaatcgtcgaggatgcgcctgccactaaggatcagtccgccgttgataagctcacagctcagatggataagcacggtttgtccgatcgtgtcaccaccggtgtgctgtcatctctgcccgcctctcgcgacgttaagatcacctcttgctcccttgtgttccacggaaaggtcctggtcaccgattccaccctcgaattgaccttcggccgtcgctacggtctcctcggtgagaacggttgcggaaagtccactatcctcaagtctattgctgcccgcgagttccccgttcctgagcacatcgatatctaccttctgaacgagggtgcaccccccaccgacttcggtgcccttgactgggttgtccgcgaggccgaacgccagttggaggatatggagaagaaggccgaggaggttcttgaggaatctggccccgataaccctatcctcgaagacctatacgacgtatgtattttcaagttttactctccttggatccagaacagaaactaactctcatatagcgcatggacaagatggatccttccactttccacgttcgtgcctctctcattttgaccggtctcggcttcaacaagtttaccatcaacaagaagaccaaggacatgtccggtggttggcgtatgcgtgtggccctcgccaaggccctgttcgtcaagccctctttgctattgcttgatgaccccactgcccatttggatttggaagcttgcgtttggttggaagagtacttgaagaagtgggatcgcactttgatccttgtctctcactccatggatttcctgaacggtgtctgcaccaccatgctcgacatgcgtggccagaagctcctctactacggtggtaactacgattcgtaccacaagacccgtagcgagcaggagaccaaccaggccaaggcctacaccaagcagcaggaagaaatccagcacatcaagaagttcattgcttccgctggtacctacgccaacttggtgcgtcaagccaagtctcgccagaagattctcgacaagatggaggccgatggattcatccagcccgtcgtcgccgaccgtgtcttcaccttccgcttcgccgatgttgagaagcttcctcccccagttctctctttcgacgatgtcagcttctcttactccggtaagtgggaggacactctgtacgagcacctcgacctcggtgtggacatggactcccgtaccgccctggtcggccccaacggtgtcggcaagtctaccctgctacgtctcatgaccggcaagctcagccccatcggtggccgtgtctcccgtcacactcacttgaagctcggtgtctacagccagcactcctccgagcagcttgatcttaccaagtcctccctggagttcgtccgtgaccgcttccccgagaaatcccaggactaccagtactggcgccagcagctcggccgttacggtctgagcggtgagggccagactgccctcatgggtaccctatctgagggtcagaagtctcgtattgtcttcgctctcctcgccatcgagtcccccaacatgattctgctggacgagcctaccaacggtcttgatattcccaccattgactcattggccgatgccatcaatgcctacagcggtggtgtcgttgtcgtctcccacgatttccgtctcctcgataagattgctaaggacatcatggtctgtgaggacaagactatccgccgctgggacggctccatcggtgactacaagaaccacctccgtaacaagatgttgtctgccggtgccgtttaagggctttattgattctctttgcttgttcaacttttttcaacttctttttttcccctattgatgacgacgaaatgctagacgagaactgaaggaatacaaatgcccacatcgtggcactaaaagtttggatcccgcaaacagggacactccaacaaaaagttccttggattgggatggttttcatttaatttctttttgtccgttagatcgtttgtccttccccccttttccgaatagattttgggttatggaggattggacttttgcgtttattgctatcatgaactcattacccctgattcgatccgtctgtttctttgtcttatgcgtccttgatagagtgtttagtcctcttttccgaggtgaatataagggatgccagttactatatcgtatggcgctacttgtatatatgatatgcttcctcttgatactttcgatgtttccatgacctgtctagatatcttccccgtcagcagtgtcgtgactgagcatcggccgggactagttcgctaattgacaatgcctttcttttctttcttctctttctagttattcttatcccaagactaatagaatacaccatgacgagccccgagcaacaaagaacatcaacaatgatcatagtacctcattgtcttcttcatcttcttgtttctctctatctaaaacaaagaaccaaacccaagtcaccactaacagaacctgcatatataaatacccgcggatctctccacaatcccatcccatccataatctcattctccacagcgacatccgcagccatatctaggtaagccctaacaaattaacccaccaccagaaacccacccacgcacccatgagcacaatggacggatctcgcgtgcacccgcataatttccgagagatctacacaaaagcctgcgaagccttcgcccacaagctgcaatgccaggtattcgttctcctctgcccatcccccagcccagacatggaagagatcccgacacggctggatgagctcggcgagcgagtcatgcagatcgggttcctgggtgaggtcggtgaggtcggtgtccgggatcataaccgcgtgcgtgttcgttgggggtcgcttcctattaaggagatttgctttcagattaagtgggaattggctgttcttaaggatgagattgctggtggtcagacgccgcctcagttgattgcggagcttttggcggagattttggattcgttgcctttttgatggattttatgtctatttgtttatcgtgcttagtttgtgtactccataggtcttgtaggataggagttcgtgtttgaggtctggtaaaaagaatgacactaatagtataatcacaggactgatggggtttcaatgtcgttgtagttctacggaaggtaatacgcagcgtcaattacaaccactgatatcgcatccattgtatatcaaaaggctgaattgagtttggtttccatgtcggatcggagcaaaatagtcctgagccatattgtagtgtttcggtgcgatgatggcagggatgcacctgtgccctttccgcgtttgagactcgaggttttaggtctgtatagaccgagagatctactggccgcaactcggacctggaatttggaaatgtattatcatgtccgacggttggtgcatatataagtgcgtccgttctgatttttgatattaaacatccgtgtcttttggtgcaatggcatgcatgcctattactacttggttcgctgagtgaccaactccggaccaaaaacatcatcatcctgacggacagcctgcccttgttctaatttccgctttttcgctaggcgttctgtttcgctctcggagttgactattccagtgtcactttgaacagcggaagatggctgggttgattcccgtttagttgcagccaggttcactttctcggggttctggcaatgatatagtttctttgcgatgcgcttgaggctcttcatttgcgcggggtcggaggagagaggcgtgtaggattggagtagagcagagcactcagtcaagacgtgatgcagcttgaagcggatttcgtatagagggttcaccaggccattttcgtctgtttcgggggcagggattgtggctgtaactggaccaccgagtttgacatccagcaaaaactctgctaggggacgatctgccagtaaaaaggcagagaaccatatctgggatggtgtgtacaagaagtaggcgtccgtcatctgcgcagcggatttcagcagctcacgagttgtgccgtgggctcgagcgattcgatctgacattgaagatgatgggacgggaggaggtgcgatggacagcaatccttgctggaggtcttctgcggtctcatatggtagatggggggccggttgtccttggccttccgcgatggcttgtagttccatgacgccgccttccagtcctcgaaacggatgccgtacatcaaaggtgaaacgcagtccctgcataagcaagaattccggtgcgatgacgtcctctgtctttgtgtcaccaggaattccatctgcaaattgtcgaagagatatatagtaattatcggttttcgtcgcgacgaagagcgcacacgccatgatcgacttcggatggtatgtcatcggtgaattggttaggtagaagcggcggaggtattggatcgcggtggcctgtatgcgtagaatgaaaaatgtcagcttcccaagcttatttgtacttatgaagagcgtaacgtacccggaccattgttgggattggtggcttatatgtctctcccagctctagcgtcttctcgcagtaataccgcacgagaacgagctcctcctccggtgtcaaacattctacatctttattcttcgtgtccgtgttgctttccggtagtggtgttcccgccgcggaggatgcggtcgactgatgagtctcgcgcgatctgtgcaaagcggcgcgcacgcgctcgctagcaacggcatttgtcgtagctctgagaaattgcagagatggctcggtgtatgaccacagacggtactgggacgaggcgcggtagatgtcatcttcaatcattgtgttagtgctctcgtcttgttagaagaatcaaagaaacctttcgaggtttattcttcggcggagataacggccggctggtttgaaatttcgagaagaaatagacgtaagttgaagggccgttttagatatgagaataagtatttgacgatcctcaaggagctcagcaattaatccacttggtttcatccgaggaggttcgaggcttatcgataagaccaaccctcacttcacctgagcagccctagagctctgtctaagggacgtcaaatcattatattgttttctagtcttttacttattttattggtttggatatcaattaaaagctatgtaacatatatttgacatgcataagccacccaatgcaatccgcccaatgcaattcattcatattccatatgtgctttctgcctcatttcatcccgagttcaccccagaaaccagaatatacatcactcaccgagaagtcgggcggcaatatcacccatacgaccttcttccaactcatagtcttgacctccccgtctttcgacaccgacatatcggaaagcagccacaacacgatcaacgtcgaagcccatgctggagaaacggtcgattaaattcttgttgtacccatcatatctatagataatagtcagcaggatacccaatgaatggtagaagaacggctcactttgcgagattatcttcgctagctgcttgccgagtgtcatctaggcttgatccgcttccattgtcagcactacgcacgggagctccagcatagaggactgcccagtcgcgtgcaacacgctcaaattccttgggtgacttgagaagcatattagccacttcagcatcttggggatctttgggctcgggagtgctgagcaaagactgcagtgaaagcagagcggacttgatagtcagaactggtgaccaagcactggaaagtgtgtcgaggcagattgcgccctacattgcctatcagatcccaaattcgctcatatctatattataagggcactgaccgtttgactgctgacatttggatgccacactttggtctcaaacttcatggtaggtggtcgaaaaggatagtccgttgggattttgatatcgatatcgtagatgccaccttcatatggggtacctggtggccctggaaacgacccccttaggtgagtgagatcgtccaggttgccaaatggctccgcctttatgtgagagtggacatcggcgtgaatgtccgcaatttcttttccaatgcgacgcatacgattgctagccatggcgattcgactcgtttcaaaaagaggtcaaacaggagatgttgaaataaaccactttgtgtgtaaattgtggagacaaatagacctatttccgtcttgccaaagactgcacaagagcgtggaagctgccgtggagaggaggacagagtggggctaatagtaggatagtgttaggaaggtttcagatcaagtagagagcctcacacatggggtatgaaatcctctagggaattgaaagcaataagataaacgaggatctcaccaaaggaggggaactatacagggaatcagtatgagtgatgagctcaaacactgtcacctgtcgcctgttatatgcaccttagatatacctgagatatatacctcgacagagaacacgagtcttaagtctcggttgtgtgaggtaaacctcagtatagagcctcggaggaatataaatttcttcgattgtcttcgagaatgtcggaggtacaaccttggaagccgataactaagacaggcgttaaggcaacaggtgtggatgacgcagtggcggcctgaggcgtaaatagtcacgtgtgggcctaacagcttccagctcgcccagcgtcctggcctccggcgataccaccacatctgcattgacaaaccatccctttcgactcgtctttcacatcattcaataccaaggctcgggatttacctttctttgattacatttgcaacttcacaccagggattctgatagtctccatctcggtggctgacaaacatggtgagtgttcctttgggaggttatctcgatttatattctaacattcaaaactagggtcaacaacagtctaatctgggcggcggccctggaggccctggaggcgatgacaaggataagaaggtatgtttccaactcatttccactgctacacccagcgctaagaccatatctcttttatcagaaggagaagcccaaatacgaacctcccccaccacctaccactcgtcttggaaagaagaagcgcaaggctgccggcccaagcactgcgtccaagctccccgatatctaccctacatcgcgatgcaagctacgataccttcgcatgcagcgtgttcacgaccacttgctgttagaagaagagtacgttgagaacatggaacgcatgcgcaaggccaaggctctggccacgcaagatcccgctagagggggtagtgacttggatgtgatggatcggaacgctgatgagcggagccgagtcgatgacatgcgaggcagcccgatgggcgtcggcaacttagaagagttgattgatgatgaccatgctattgtctcaagtgccaccggccctgaatactacgtctcgatcatgtctttcgtcgataaagatcttctcgagccgggtgccagtattctcctgcaccacaagtcagtgtctgtcgtcggtgtactgacggaggagtctgacccccttgtctcggtcatgaagttggacaaggcgccgacagagtcatacgctgatattggtggtctggagcagcaaatccaggaagttagagaatccgtggagctgcccttgctacaccccgagctttatgaagagatgggtatcaagcccccgaagggagtgattctttacggtgccccaggtaccggaaagacgctacttgctaaggctgttgccaaccagaccagcgcaaccttcctccgcattgttggcagtgagctgattcagaagtatctgggtgatggcccacgcctggttcgccagatcttctccgttgctgctgaccatgccccatcaatcgttttcattgacgagattgatgctatcggtacgaagcgatacgactcacaatccggcggtgagcgagaaatccagcgaaccatgctggagcttttgaaccagctggatggattcgatgatcgtggtgacgtgaaggtcattatggccaccaacaaaatcgaaacactggacccagctttgatccgacctggtcgtattgatcgtaagattctcttcgagaatccagaccgtaagtgataccctagtatctactgctgcgccagcttactaacaattcctagaaaacaccaagaagaagattttcactctgcacacatcgaagatgtctctcagtgatgacgttgatctcgaggaattcatcaaccagaaggatgatctctctggtgctgacatccgcgctatctgtaccgaagctggtttgatggccttgagagagcgccgaatgagggtgcagatggaagatttccgggctgctcgtgagcgtatcatgaagaccaagcaggacggtggtcctgtggagggtctatacttgtaagcgctggaaattatcttgagggtgtgccggagtgcttgcgctggagacctgtactcagctaggtccctcgtgtattgtaataatcgagtaacgaacggtctcaagggtctactgcccagcaatttccctaaatatattcataaacatacatcgaaagtgcataatttgtccgttgtagttagtaatccaggttgtttgcgccaagcttatcagcgagttgcaaacactgcaaacaagctcattatcaggtcgaagcgcctctccccattgtcgcaaagtttctcacacaatcaaccatggatgaattcgacgaggaagcattcaacaagttctttccctcaagctttgggaagcaggcgaaatcggttgatgttgagtcccagatcgaccgctccaagcgtgttgatgttgcggctccgaaaccagaggacaatgaactaagcattgcccctagctcagaagcaagagggagcgacgatgagcaaaaacacagtgatgataatagcgacgaagactctgacgattcagatgatgacgaggatgaatttcccgtatcgcatgagcttgttctcaaggctcatgagcgtgccgtgaccactatgaccgtggacccctcgggggcccgactaatcacaggttctaccgattgcacactgaaactatttgactttgcctcgatgaccccatccacactccgcgccttcaagtccgtcgatccttcagctaagaaagcgacggccgcccaggacacccacgccgtgcactacgccgcgttcaatccgctctctccaagttacgttctagctgtgactgccactgcgcagccacgcattctcagccgtgatggtgagatactcacagagtttgtgaagggagatatgtatctacgagatttgcaccataccaaaggacatgtgtctgaggttacttgtggtgcatggaacccatctgatcctaacatatgcgccactgctggaaccgacagcacaattcgcatctgggatgccaatgttggccgctcgcagaaggaggtgatcgtgcacaagtcgcgggcagctggctccgctggtcggactaagatgactgccatcgcatggggctccccgaaacaaggaggggccgacattctggtaggtgcaggtcttgacggaagcctcgctatgtggagtggaaatggcccatacaccagacccagcgcagaaattcgggatgctcatgtcaaagatacatggacaagcggtcttgatatcagttccgatggaaggcttgttatcaccagaggtggtgatgatactatcaagctttgggataccagaaagttcaagactccagtcacaaccgtcacacatacctcgacatctttccgctacccgacatccaacattcagttctctccttcgtctgccaatatcatcacaggttctgaaaccggccatctgcatatcctcaaccccgctactctcaaggcagagctcgtgactcctgtgacaccgggatcgcctttgattactgttctatggcacgaaaagctcaaccagattatgacaggctctgccaatgccgaaacccacgtcctctataacccgagcatgtccacgaaaggcgcagcgatagtcatgtccaaggcaccgaaacttcgccatgttgatgaaattgctatgcccgcggacttgaatcagggattagcaggtgattcggtggtcgtcggctccaatggagttccgcattacagctcggcgactaggtctgctcgtcatcctacagttggctttacagcctctggtcgctctcgcgatcctcgacgaccgcatttgccgatgcagacaccatttgccaaaaataccccagatgagaagcacatcctcgagcatattccactcagctccatgcgagacgaggatccacgtgaagcactcttgaaatatgccgaccaggcggagaaggagcctatattcaccaaagcatacaaagaaacacaaccaaaggcgatctatgcggaactcagtgatggtgaagatcaaggaccggaaaagaagaaagcaaagcgatgatctgcgatgatctgcttggatatgtactatattcaccacgacttttggtatcggaagcgtcccgttgagtcgcgatggctcaaattaagctacctatgcaatatacaaatatctagtacagcttgtagtttcatatgaatcccaatctaagcacctaactccttacattcgggttgtcccctcttttgctgctctatgacgtcccccaagagcccgacaatccccaaccgcccgcccgaactgccaatgatatttgacctcgccttcgacgttatttcaattcgtatctgcgctgcggaacgctaaatcaccgcgtctcaaatgacatcttccaagttggaagccttggaaacggccccagcctccggagggcccgggggtttgtttagtgctgacatatcaattatctccgcggcgggcctccgctgttagattaccgcctaaccaaacctcttcatactcattactagtacccttgtccgccgtgataatcttcgcgcgagaaagccggattacccggaacagaatgccgtcttttgcgacttgacttgagatcaaatgctcaccgtcgaatcttggggttcgttttgatcggccgtacccaccgaagagctgaggtgtaaggggtgcttaacaaaggcttccccgccaaagcgtgcgataaacagtactcgagtactaggatcgcatcatttcatcagaacggatggcatcttaccagtcgtcgctggtagcaagcctgctacctggtcttctttcttcggctgtctccccgtcaagttcatccacattcgcgacttcttcttcccatcaccttttcgttgcgccatcaaattccacatcagaaactcctcatgaccacgatggaaataatgggggaggcatgcatgaatggtcatcgctgattggtattatcacggcgttatgcggcaatgttttgatttcattagctctcaatatccaacgctacgcgcacattcggatcgcaagagaatgggaacaggataagaatcgcaacgggaatttcggaaacaacgggacgcccctcgggtcgagggggaggtcccagaatcaatatcgagactctgagcagaatgatttcgaaccttatcgtgacgatgatggcgacgacaccgagggcacaaacattggtacgatttctcgaaccactagcaccggaagcaaggatggcgcagacggtcgcaaatcctacctcaagtctccgtactggtgggttggaatcgtgctcatggttgtgggggaaatgggtaatttcatggcctacggctttgcaccagcgtcgattgtctcgccattaggagttgtggccttgatatctaattgcattattgcgccatgcttgctaaaggagcaatttcgcaagcgagatctctggggcgtgctcgtctctattgctggtgccgtcgttgtggttctcagtgctaaatcgtccgaagaacaaattggacctcatgaaatttgggtgaacatcaccagatgggagttcctgctctatctagcattgaccacatcgttgattatcggcctcatgtgggcaagtcacaagtatggctcgcgatcgattcttatcgacgttggactcgttgcattatttggtacgtttctatttagttatttttacttttgggattcatttcttgttggtcttgttgctgactttgtaaaaaaggcggatacacggctctttcgacgaagggtgtctcttcgcttctgtctggcacattgtggcatgttatcacattccctattacctatctgcttgtcttcgtccttgtatttagtgctttgatgcaagtccgttacatcaatcgtgccctgcaacgcttcgattccacccaggtgattccgacgcagtttgttctcttcactctcgctgtcatcgtcggaagtgcggtcctttaccgtgattttgagtcgatgacggccgagcgcggaactaaatttgttggtggatgtctgttgactttcctcggggtttacttcatcacgagcggcagagtccgcgctgacgatgagtcgtcattttcatcagacgaggaggggtccattggtttactcaatggtgagaggtatcatgacagaattgagttgtctccacctgcccatcagccgaagacatcacacgtttccacagaagcacaatatgacgttccacagtccccaaggggctccatattgagccaaggcactgccgaagacgatgatcagtctacacctagaggtgttctttctgccgcgccctcttcgcctcatggatctttaactggtgcatctcctctgtctgctccatcgtttgacttcacttcaccattgcggcccccctctcgcatgtctaacccatgggcagatatccgccctgttactcctcccgggcatgaagacgaggcaatgcaatcctcaacagttcttctgcgtttccctcctgcacctggccccgaagaagcaacaggagccaatggaaatgtcggtgccgtacgacgtgcttcaacacccccgcttttaaatcaggccaaccaatctatccacaatgaggctccccctgaaacaacatcgcggcgcgctttgcgcaactctatctctcatcgtttctctcctggacctctgcttcccgcactttccggtggcttcagcgcggtggtcgctgattctatccgtcgtggtgacggtagtcctctcaaggatcggccaaggcggagattaggacgtcggcgccaactcgatggcgcttttgcagatacatcccttgagggtcatggggatgcggcgctttcacttgcaactgctcgactccagtccgccaccctagcggacagacctgcggagactggagatctcgcgacggaaataaataacataccaacacaacacatcaaggaggatgtgacccatcttcgcagcctgagtgactcgtggaatggggggcttgcgtggctgggtggtgctctccgcaaaccccagaaaacccaaagagccgacagtgttgctgtcactggaactccaacaccagagaatgagacacaatccgaaccacactacaacatcggcgaccatgacgccgaggcttcctagctctgaggcataagaacagttcattagagtggccatctcactcgaactctgtatacatttgctcttttccctcgatatctctccccttggcgcttttcccgataggtttctatcggcatattcttgtaattaacattgcatactgcgggtatatgtttaagaatttatgtatttcttccttttcacgctgtatatttcatccgtgaaggaggcctcggccaccagttttacctttagcctctttatccgttcaatttatccatattgatcacctgccacacatcttgttccggaagtatctatcggagaaaacgggcatcccaataggtaaaaaggttgacagcacgtaccactgcccagaaggcgcagccagctaccccagacctccacttctcgagtcaatttagccggacagccgacagtccttcccctcaaccccggaatgccatgccaatgtggagtaggggattgctccgtctcctgatagtactagctcggatcaaacgactctaagcaaggcactactgcagctgttcagactagcttgatcgtttctagggttgaagacggcttcatttccgatgcacaatggtacgagctacctgcctttttctatctacttcaattcgtgggatcattaaatcatgtcatacaattcgattaacctctctccgcagttcaagggtgtcgattgcgggtctgcatggacttatatgcaagagcttccccaggaatttatttttcttccttccaatcccatgctagtcaatctacaacagttgacgattgaatttggaaaataaggggttgtcttctcgaaatggtggccaatctgctttccaatgggctgctgctcgtgcagatctttgctgccctagctgtgggaagacagagcctcagccctctctacaaggattccaatgctccagtggaaaagagagtacaggacctgttgagccggatgaccatcgaggataagcggtcccagttgattcagggtatggtttcatctcaatcgctgccatagggaagttataattgctgatgcatttttgtacaggtgatattacgaattggatgaaccagacctcgggagaattcaactacaccggcctggttgccaacatggagctgaaggcaggcatgttctatggtatgaactcctctactcagctatttgatcccttttttatcggcccgcagaaaccaacagtaatgccttacagtcggataccctgttgcttgggattggatctcagacaatatcaagagggcccaggactacctcatccacaacactactctgggaatccccgcaattgttcagactgagggtatgtactccaaggatacattctccagctgcaatgaattcaagctcatacatttcttgcattaggtatccacggattcttgattggtaatgccactattttcaattcgcccattgcatatggatgctcgtggaacacagatgtaagcgggtactatacttgcactgtcatacatactgtcatcgagatctaacacggtgttgtgtagcttgtcgagagaatggcagaaatcattgcacaagaagccaaagcacttggtgttaatcagctctttgcccctgttgttgatctcgctcgtgaacttcgatatggtcgggtgggattcatctacatgttgatacatccatgacgactaagctaacaaagagaaaaggtagaggaaacctttaccgaagaccctttcctcgccggcgaatatggttatagctacgtcaagggagtgcagggcaagaatgtgtcagccatggtcaagcactttgcaggcttcagtgcccccgagcagggactcaatactggcccagttcacggtggtgaaagagagttgcgcacaacgtatgtcgacccccaagctcagagaataaacagttgactaagtattgcataggtggttgccttctttcaagcgagctattgtcgatgccggtgcttggtccatcatggctgcgtaccactcgtaagtctaacctgatctgatgatataccgccatgctaacatatgtttccagatgggacggaattccagcggtctctgactaccacactctcaccgagatcctaagggaagaatggggatatgaatatttcgtcatgagcgacgctggtggaagtgacagagtgtgctcctacttcaagctttgtgagagcgatcccattgacatggcagcggttaccacacagctgctgaatgctggaaccgacattgagatgggaggcggttcattgtgagagctttaatgaaacaagcacgacccagaaacatacactaactaccgactagcaacttccaaaagattcccgagcttgtcaagtctggcaagctcgatattgacgttgtggatactgctgtggccaggttgctccgggtcaagttcgaaatgggtctcttcgagcacccataccctgctgcgcctaggaacgagtggcgttcgctcattaacagccccgaggctgtgcaagtcgcaagagacctggacaaggaatctatcgttctgcttgagaaccacgaagacattctgcctctgaagaagtcgagtaacattgcggttattgggcctatggccggtggtctcatgaacgtaagtcacattcttattccacttttagcctagatattaatgacgtttatagtacggtgactacgttgtctacaggagccaataccggggtgtcactcccctcgaagggatcaaggctgcagttgacgacaacgcccaggtccactatgtgcagggatgcgatcgagcgagcaatgatcaatcaggctttgaagaggcaattgaggccgcaaaaaagtccgacgtggccgtcgtgattgttggaacctggtctcgcgatcagggggaactctggacaggactgaacgcaacgtgagtaaacccaccttgtttcaatatatatctgaaagtgtcagtactgacagacaaaaagaactggcgagcacgttgacgaagacgatctgtcccttgttggcgcccaaggacctctgattaaagccattgccgacaccggcgtgccaacaatcgtcgtcctgtcaagcggcaagcccattacagacacatggatcgcaaactcaaccgctgccctcgtgcaacatttctatccatccgagcaggggggtaacgccctcgccgacgtcctttttggcgactacaacccatccggcaagctatctgttagctttccccgctacgtgggcgatctcccgatattctacgactacctcaactctgggcgctccatgggcgacgtaggccataagtatgaaaatggaactctcgtgttcggccactcatacgttctcggtgacgcttcaccgtggtaccccttcggctatggcaagagttactccgccttcaagtacggagctgtcaaggtcgacaagagcaagatctctacgtctgagaagactgtcactgtgagcgttgatgtgactaatacccatgctacccgtgagggtacggaggttgtgcaggcctatatccaggatgatattgcctcggttgttgttcctaatcgtcagcttaagggcttcaagaaggtggttatccctgctggaaagactaagactgttgagattcctattaaggttgatgatatcggcctttggaatacttggatgaagtatgttgttgagcccggtcagttcactgtccttgtgggtagcagctccgaggatattcgtggtaatgctacgtttattgttcgtgatcgttgagcttgatatcgaagggaggcatagttcttaggacgtagtccgatgtgtgtgttgtttggtgcatcttagattgtatatatcttgcgtgatgtgtgaagatgagagattcgaattttcagaaacccagtcgctttccctacatcattttctcctcgtatcctaagctgattttacttctcgacgactagatacactagaatttactatgcactgtgatacatatctaacattatttatctcgcctggatgattctaccgggctggtatgagatgataatcagtatttgccgtactaccgatcgagatacgtgataatcaattggattcgaagcttcataaatggtgtaatggggatatctcataaaggcatagcataaaggaccaaacgccgtttctaaccaccgataattgatgttgcgagactatgctgggtcacctgcagcacgagaccctgcttgaccagtggagggacctcgaccaggatctggggagaccaaaggttccgatggcttgctggcaccactcgcaggtggattgctttgattgtcaccggagcgaccctctgctctccgagttttagcaccctctttcaatttctcccagcggtctcggtatcgcccaagaacattcttgagtttgtcgttttcgtgagcaacactttcaagtttattctcactacgtcggatctgctcctcgagttctttgatccgcgcgtcagtatcagccgcacccggcggcgcagtcagcatagcaacaggagatgcagtggccgtagaaggctgcaaataatcaggcgtcccggcgctctggcggtgcatcattcggattgattgctgcagcgccattgacgaagattgcgcgctcacctcccacatatgcaaccgtgtcgcaagcgaatcggtcaaacctctcaacgtctcattctccacctgcatctcctccattgtcttgtgtgtctgcggagtggtaagcttatcgggtgcgccgcggcgtcccgcccatatgcgtgaaccactggcactatgacgcatttcaggagacgagggggtctctcgcgcatccacaaagtcgtcatcgccatcctcaagactgttcctgcgtgcctgcttttcagctcgggtgaggattcctgcgtaggaaatagttccacccgtggttgggactacatagaatgactctgctgggttgccgggacctgccccagagccgtcccgaatcgaccgcaatgcggctcgagagaagagcttgttcacgtcaggctcgcccgcagtcatggaccggtctagaacagcatgctcacggtctagtttcacctcagctgaggccttgcgactctgttcagcgcgagctggatcagaccctatttgaatacccgcgaatgccaaaggtccggacaccttggagaccagtcccccgaaggctgagtagaagcggttgaatgcttcatcggcaattgcaggcttatctttcgatccttcagcttcagctgcactaggtacggtttgctgggaatccacctcagtgggactgggtgtcggaggagaccatggttgtctgggtgtagaaaaacgactgtgccgattcttggctggtctgtcacgtagccttgtatcgccggctctagccctcggtggtgtttcggtcatctttgccgcggcatgttgcgatgtaagtgttggcgataccggcgatccacgccggggctgtgatgggattccccgggcggatgctaggttactagcaatagatggtgtatcccgacttggcagacgagtgttgcctaccaatcttggtggtaggtgtgcatcctggttcgcgcttgcactctttgtgccgccagtctcggcggtcggttggatcgctaatgccgaggagccagtagcaggtactgtttccgcagggatcgtggttgggtgttcatgttggaatcggaggatttcggcgagcttcttgtggtgagtttcgagtaaacgtagggtccgtagggcctatgacgcgttagcccagaaccgagcgggggtagatcttcaactcaatcaagactcacctcatggtcggagctgctctgtgcagccgttgcgaattcaccagcagctagatcatgctcctcgctggcagcgactgggttggccttgcgagtctctagcactgcgttccgggcatgagtgtgggcctgagtgcggtcagattatgctgaaaatgaggggatgaggtcttaccaaggccaaaggagctacttccatggtgaatatgatttcactaggagtcaagagataaaaaccaggtgcattcttctgatgggatttttccggggaatgttggagaagtgacgttatgcgcagtgaatgggagtttgatttgacagtgacactacggagtaggtaacaccatgtacgccatatacagatacatgaggtggacgagaggacattcaaaacaaaacaatacttctagatcaacctaaaataaatattctacatttcagactgaaagcagccaaatgtcaagtcacatccacattccagtggagacgcggagagtagacgctgatagctacacggcggtcaagctactcgacggccatcgactcagggggaatgccaggaagaccaagaatagcaggaataatagagaatagagtcatatcatcacgaatgacatacataaaaccaattgaataggagaaaaagcaagtttcagtctcataaggctagtcagttatctacttggcgggtgactaagttgcggagctccaggggatgagcggacgattcagcacttctctctctctctttacttcgatcccgtttatatatggaagttctcgcacatgaaaagaagagaggcagaaagtgttactacatacgcctcatgacaactttcccttgaatctcctggtctccccgcatcaacccccccgattctcattccctctgcattcctccaattatggccgactcttcatcttcaagctttaaaggcgagaacagatcgcgccgctcctggacattatcggcagaatcaagtgcaatcggtagcaacggtcggtcatcccaggagtcgaccctcgagagaccgaaaacccagggtggagaagcagcagatcctaaggctggtcctagtggattctcaaagctactcgatgcgcgtcggaggcggaaagagcataaaaaaaagcagcagaaacaagccgacgagccgccggtgccgactgttgttttggaacaagacctgcatgaaagccggtccaatgaatctcgcgatgggacctccgcagccccgtcgtcgagcacagacagctgggtgccggagaacgagggcaataatctattgacagatgattccgagccggacgggtaagttgaacaaatggccttctcattgtcttggactactcctaaccagctgatctttttggcttcgtttaggcccccgccgctcacctcacatgactcccataccggattctacacctcgtcctccccaatgatcaagacaaaatcggtggataccgcaaatacggaaggatggcatggtgatgccgagtcagctgttagcggctctagtgccaccgggtcagaatcaaacccgggtgatagaatctcccgacgcgcaacatcgggtatggcattggatgtccctacggactcaaatggcaagaaacgcagtccatcccctgggcgacgcctgagaggcgcttccaattcagacaaaaagggtgccagtgacgacgctgaggcttcatcaattaagtctgggagcaacaaaagccgaagtctgttcggaggcagcaggcggggcagtctttcatcaaaacgagcacaggcagcccctgacgacgttccgcctttgcctgcgccaattcgtactgatctaacggaggagaagcctcgtgcgcttgaagcgagccccatgccgaacaccccacctcataccgctattcctgcaccagagacgactgtaacccctccaacaccaactgagcatcgccctctcagtgcacaaatcctatctaacaatgttaccgattcgcccgagcccctacaagaaaattctcccggtgttactatcgtgagcccctctggaaacatgatctctcaccgccgggtgcggtccgcttctgcagctcatggcccaagcaaattgtccaattcagtgtctgcactgacacctcttgaagaaaaaacccccggggcgaagaatgcaacttcaaaccagcaaagtggcttcttctcctccgtgttttcagttgcgcaaaacgccgccacttccttaagcaacagcatcaacgcacaacagagaaatcgtccaacatttcaacctgttcctgctgatgctgataaatcactcaatgaatccacctcggaggagggcgaaaggacatcggataacggcaagactgaagggagaccatctgctgtagagactcttggggcaggagatctgaacttcagccatctggacattgacgcacgacccggtgagtcaatcacgactgccgacggcgtggtgattacaaagccagtgaaccccgctgacaaccgcaaaaacacagctgtttcccggcgagatgaggaagcggctaaacttgaagacaaacgcgcagcgcgcgctgttcaagtagcatacgaaagaccctcggagctttcattgacgggccctgcggaagacgccctggagattgagtctaacacctcacttccgaaagatagcttaattctgggtgatcaaactcctcccagtggtagtattattgacggtgacctaagcgggggccttgggcgctcaggcagtgtgcgcagtaggcttgcccggcgtcatcggggctcatctggggccacagcctcgacgattggagcgattggcgccaaccccgctgcccttggtgttcccggtatcaattccagtgtgcctcggttgactggcttcgctgttgcgagtaagaagcgcaatcgggactttcaccaattattccggagtgtacctgaagacgattatcttatcgaagattacagctgtgcgttgcaacgtgagatcattcttgccggccgcatttatatttcagaagggcacatctgtttctctagtaacatcctgggatgggtcacgactctagtgatcagcttcgatgaggttgttgctatcgaaaaggaaaacacggccatggtgttccccaatgctattgccattcagacacttcatgcgcgtcacacgttccgcagtttgctcagtcgcgagtccacctatgacctaatggttaatatttggaagatcaaccatcccaccattaagagctctgtgaacggaacccgcgtaacccatggcaccggtgataagacagagaaggtcggggaggacgagagcgagtccgagagcgaggccaccgatgaagatgaaatatacgacgaggacgaggaaggagagaatgccgagagcttctacgagggtggcgacagcgccaacaacagtgcaacatcattgccattgcaaaaaggattaagtcgtaaggcttcgaatctatccacacatgctgccgtgccagtggccggcacaaatggcaatggcgataaaaagaacggagacaagggaacttccaaggacgcgactcctgatttcccaggtccgactacacatgcgcctaccgagtacgtcgaagccaacggacagtacgaaaaagtcatcaaagatgaaataattcctgcgccgctcggcaaagtcttctctttggtttttggcccagcgtcgggcgaatttatgaccaagttccttgccgacaatcagaaatgtggagagctacagttcgagggaacaccgaagggtttgacgatggaaagcccaaccaggaagtactcatacatcaaacctctcaatggctctatcggtccgaggcagaccaaatgtatcagcaccgagaccatagacttattggaccttgaaaaggccgttcttgtcaccctgagcacccaaacacccgatgtgcctagtgggaacgtatttgctaccatgaccaagtacctcttcacatgggctcctggcaaccaaactcgcttcctcatgacttgtactattgagtggtcaggcaagagttggcttaagggtcctattgagaaaggtgcaattgatgggcaaacgacctttggtaatgagctggtcaaagccttgcaggttggtgttgttccccgtgggcgtggcgctggacgaggcaaaggaaagcgcaagaagggcgatgccgcagggcgggagtcgaccgcagctgcttcgttgaaggttactgtggattccaacaccggaaatggggaatcatggggactattcgaaccagtccgcccactcctagagccctttaccagccttctcagtccgctatggactagcaacgtcgctcttctagttatcgcaatcttgttctacatggcgttcttccgatcctcgccgtcgtcgtccatgctttcgtctgatgtcggctttcccggtcacagcttgcctcagaggctggccgcatacgaggagatgtggcgacgcgaagagactgagctctggaattggctggaagaccgggttggcatggacggaatggtatttccaaacgtctaccggtcgcccgagccacacccaagtcgtaggtcatctggagctagtatactcgatgagcgcgagctcgctgcacggcttcgcgaagagaagatcactgaccgtgagatggaccatgccattcgcactacccgccaacatctcgacgtccttgagaagatggtggacaaacgcaaagcccaatgggaagccgatgaaccagtgaagtccgaattgtgatggacatcgatggttgttcctccttgcacataagcccaaccaggctcccccctatcctctctcctttataaacttgtctcttgccagaaaagtcccacaattttccttttccaacaccacacaaaatctatttccttgtctttacaacttgttttattctcatacatttatcggggtgttatcctggagtcgtggtaacaagcagagcttgtccatgctgatattcaccctcctcacattcattttgaacagtccaccgtcattatccgactctccctccccatatccttcgatacaggggcaggttttccttgcatgtacatgagcgccaactatcttgtctttaccggtccacgagctaccggcttctattttcttgttcttattgcttatttttcatctgagcgtactagctacttcttttttttttgtgtttcataggtggcactgtatccctaaaagtttcccatgcagcgtgtttttgctgtttggatatcttttggagtgctaccgtgtgctctcttttctttgcccattgggcttctctgtgaataccttgagctatcgctatgttatttacatattcaatttaggctatgcctgacagccttgtgtgcgttcgtactactagaaagtaaattacttgcttaagcttgagataagctcgaccatatgtccatatcacttaacaagagaggaatatcccgaatgactgcaatagcctggtttataaatatcaatcaaggtatctcgctaagaaatcttcgtttcaatccattttcttgagcacttggtttttttcatacttccctgttgactatgtcacccctttccccttccaatgtttccccttcacttctcactatttcattcttgcacctgagatattagtttccaattgatttacacgcgactctttgagcaactcccgagatgaaatcgatcagacacatcacgacgcgttcgttgactccattccgcggacaactcttcccgatgcctcctcgggaagctcttctaccccaaaacgaattggcctggctcccagaagagaggaagacggcacatgaactgatagagcacccattcctctagagaccgaagaagcctagcaattgatggagtttaggcagagaaatagtacttgatgggctcagatctacgtgcatgatactgactgatatatctcgggaatatattacgatagaggacagttggagaaacagcgcagtcttggatacatgatcaccgaaggaatctaaaatacttaatagatgtatcggaagctgttggaaatcgttagtattgttcttacaagagttggaatcgcatcaagagacatacttcaggttttctcggtccgtcaaatccagaaatgcagtcgcatccagatctctccccgcaagaccaccctccatttgggactggatgcgatcgcgcttttgattttcccagcgcagcaggagaccaaggatactgatcaaaacggcctcgatcaagtgcgagacaatcatggaccagataccgagcgtgtaggtaggtctgtagttcgagttagctccgtggttctaggaataatagaactatcctcgagggaagaacacacgattgatccgttttgtagaagaatggcccggcaatgtttccagtgcagtatcctaggaacagaacagcgttggtgacgactttcttagtatggcctaaattcataatagtattagattttgtgatgttttaatcaaactccgaaaacagatgtcacttaccagccgtgttggccatctgcatactcaaaacaagtacaaacgcagcattgtacggccctgtcaggtaatagcaaatcaagcggcccacactgtgttcgacaggaacaaagcgaagaccaaaggagccggcaaggttaggaatcaggaagatgaggacgaaaacgcatcgtcgattctgaaagcgatcgttgaggtagacgcatgtcaaaatcgagatagcaatgataaaaccgtatggaatctgtttgaaccaggttagctgaagattattttgttatcaaataaaccctacctgcataagggtggtcaccaatgttgagaacccaagccctttaataattatggtgccgaagttcgatataccaccgttaggaacattgcctatgttgatgttagtcgatgcaacgtatctggacatggcacaagtcacatacaaaccacgccaagaatgaagaacatatagagtttgtagtccaggaaagcctccaaaacctgatacggcttgagatgtttattttcgacaccagtctgattttctcgtaaacgctcaacagccatgcggcgttctctcttggtaagaccttttgctgtaacgggtgaatctgggaggaagatgaacatgacaataccccaggtagaacatagtgcaccactaagcaaggtcagcaaaaggacagtttgaatgagcgagagaattagcatacattacgagaaactcgtatttccaagacggcagtgcacctttaagatgaccaattccatagcctagtagcccacccaatgcaataccgaggccgttcgctgtgtaccacagtccaagacgcactggctgttcacgacgggtataccacatgctcgtgatcaacatgaaagccgggtcggagcaggcctcggcggcaccgccaagggctcggagaacagcgagggtctcgaagctgttacatgcagcttgaagcatgaggaagacaccccttgaagaggaatgttagtgtctagttgtattcgagatcagtttaacgaaccacatgaaaatattggcacccagatatttccctaaacacgtatcagatggctatccagtcaaattgccagggagaatcataccgattggaagacgctgcatcagaaaattggtcgggaatgcccatgccaggaaaccaaaatagaagatactgctcagccagctataccgagttccatgtagatcgagatcttcccgaattccaaaaatagcagcatagctcaacgttgtctatttccaaaacgcgtgctattagcacagtttttcggccaaaagggagaaaataggtaaatggtcttgaatcaaagagactgaccttatcaatgtagaagaacgcatagcaaacagccaagtagggcaggatcataaagtcaatcttccacaatagcttcctcgcctccacaggatcgacttcttcgtggagctcgtccgggtcatcgaacagcgccatagccgtgtcgccgtcagcattcttggcagccttaaaattggagtgatcttggttgctttcttcgtgcgtgatagtgggaacttcggcgatattggccttcgagtcaacatcttgggatggaacagggggatcatggttcgccataatggtgttacgttcgtatgatagaaagtgcgtataatataaaatagagagcagaaatcaatgagcctgggctagatggaaatatatataaaatgcaggaccagccgggggttgggacgacacgaaatgtataaagcgataacaataacctcggaatgaccccgagtctcgccccttgattcaagtcaaagctgggacgtcttcgaaaagcagccatttcgtacttccccgcgaattccagaccctaccttgccccaagcggcatagctctcaaggatcatctgcggggaagacccagtacggggcccccacgccgtcgtgtcgcgagctgatctgtcccaaacgtggggaaggtgggtcttggctgacgagtagagcagagtcaaatcgaaagcactgttcagtccatcttaacaagtctggctgaaggccaaagcttgcctggcacaaaggctgctaatgtggtcggcgaaagtccgaggactcggagatgatgccgctggactgatcatttctgaagttgtttacaccgactcatcgctgagcgataatgcaagctcctatggatggcgtccgagcttccatgacagccgaagatgacagttgtgaaagcgagtctcaacggctgaagctgtaaggagtatcatggttcaccgccgcaatgaagatgcttcacttatccatatcgagatgaatttgtaagcaaatagcaatgccccttgctagttagctgggtatgagaccgtatgacatatgattaagagttgagaatttccttctttatacgaagattccgattccggtgtctcaaattagatttcttcccacggaatccgactaagaagttatcgatagtaaaaagaagaaagatttgaattaaattatgagccacaaatcgcacttttgatgggaatgatcttctacgcaaagatactagacggttagtcaactttttgacggggattaccatggccatatgtggctgcagtgtctatcgccggttgaagttcaagaagcgagactgtatcagaaaaaacaatcagtatcacaattacaaatgtagaaccaagatatagaatatatccacttaccgccacgaacaagatgatcaggttggacccaataaacgccgcgaagatgcccagatcccgccatcggttgtcaaaggacatattaaaagccgcatagaactgctctccaaccttgtacgcacagtacttgcaagcctgcgccgcgtcgtcgacgatgtatccgttgccaccgcggtcgaagaatggcttcatgtactcgccacaagtgaggttgtcaggggcattgaacagattcagctccgactctgtgcaaactacatcccgtccctgtagctctgtcacgaccattccgccgatcagacgagtgaatggatctagatcgtacagccatgcacgccagaagcctggcatctgcggcttggggattgcaacaccacagaatagagagaagataatcactaccggtgggttgatctgagacgcaatgaagctgttgggggtcagggctgagatcatctgacccaaagtcacagagaacatctcggtgatgaggattatgaagaactggtagccggaccggctggactcggtctggaaccctgggatgtagtacaaggggaggaaaaagcagacggcgcacaagacgctgtatgggatttcggcgaccaccattgacagtgaaaaggcaaattggctgtaggtttttgatgctgactcgcggtagaagatcagacgcgccatatcgtaccggggttgaaccatttggagaataattgctggtagcaccgtaacgttgaatataacgaaaatgcggtattgcagcgaggaacgagagtcatcgagattcaagaatacaagacccgtgatgatagaaattacaacatgggtgtaaagcctggtgaagccatagttcttcgagcgccagaatgatagatgtgttcgccgaccgacgactttgatctggtgccagagaggtgaagcgtattctctatcgaccttcttctcgtcctgattatcccgcacggcctgcgcacgctcttgcttgatctgaatgatttcctctttgacttgatccagttcaggagaagtgcgccaaatgtcgccccagtcacggtctccgatccgacgtgtttggccagcgccgatggcatcaagcatccactcggccgggttagcatccgtggggcaatcggcaccattgcgacggaagtaatccagcagaatctgggagtcatggccgatatcaccgtggtagatgcattcacctcctctttggagtaggagcagacgatcaaagctttcgaatagggcggaattgggctggtggatggtgcagagaatagcctgtcctgctgctgctagcttccgaaggaaacgaacaatgttccaggcagattggccatccagaccagaggtaggctcgtccaaaaataaaagcagttcaggcttcgctgccagttcgacgccaattgtgactcgctttctttcttcgactgagagaccagtttcaggtgttccgatgattgcatctgccaggttctctagctccaagagagtgaggatttcttctacgtaagcgtacttttccgattggggggtctcgaatggctggcgcagatccgccgagaaacgtagtgcttctcgtaccgtctgcatgtcttcgtgaatgtcaagttgctctgcgtaagatgtacctctttggaacgaggtgcctggaggtttgccatcgacgaaaatatcaccagttaccacaccgatgttctttcttgcagccaaaacatccaacagcgttgtctttcctgcaccggatgctcccatgagtgccgtcaactttccaggctggacatagccgtagacagagttcagaagacgtcgggtacctgagggcacaggaacttcgtaagagaggtcttcccaggtgaacacggacttggaggtaatattgaggtttgatcctgcatcagactgaagagtctttgcttgtctgcttgctttcctctgcatcaaagcctcatttagctctttgcgctcggcgttctctttctggtagaaagtgatggtcttgccgcctgcaccgaattgcagtgtttctccaaaatataagtttgaaatgaggaaaccaacaataagagcaatcatgatgccaaagtttcgccaaagatcaccattcagataactgaagctttgcgcgatgtagttggagcccgagatgattgctgacccagggtcgcctcccactagagtacaggcctggtgtgcaatgtcggtataaccagctccagctggcacgagtgagtctttggtacatgtcagagtaaggtgcctaaattcgttgaccatcaatgcagcgaatccgagaccaaaggggttgatgaagtaaatccatcgcagccacacctgagcgccagaccactgaataagatatccggacgtcaaaacgaagaatgtaataatgacggatgcaaacttgatggcataatcgaagtcaggacatagacatcccacggttcggaagaagactgtcatagtcacatagccctcaaggataatcaaaacaaatataaagaacgccccagcatcaagaaccagtccgcacatgaagtaaacgatgatactgaatacgaggatcctcgcgatggcaaatgcagtgtcaacgataatctgtgcaataaaaagtgcgcttggtcggtagaatgtgaatgaacggtgcttgttgacaattgagcggcccatcattgtggctgcaagttccgagaacgcctggaagccattgaacagcagactgatgaatagaagacctcctcgagtaaaagcaccggcactggtcttgggttgattgagccatacagtacccaatatgatggcaatgccaacagaggtaacccaggagacggtcaatgcaaacttgtcttgccatttaaggaggaactgccgttgcatcaaagcccaggtttgtaggtggaaaggaatcgagtatacagatgattcagaggtaaacttgcgctttgcctctttattagcaatctcgaaatcatcgtagattttcttttccttctgaatctgggcgcggtaggattccatttcttggtctagtctttcactgaagacggatttgtcaaaggcttcgaccagcgcttgtggtgtagatggcacatcgtcggcacttcttccatctttgaactccctctcgaaaggatcggtgcatcctgtcaagtagtcgggcgtggtttgacgaggcttttcgcggaagccgaggccttcgaaatatgatcgtgcttcggatgcaggaccgaagaatacttgacggccattgtcaatcaccaggaccttgtcaaactgtttatagatgttctcggacgcttggtagagtgacacgaaggttgttgctttgtatatgttggtcaaaattcgtagggacttggcgaaatcgagggcagtcgaggcatccagaccacgggtgctgttatcccaagccaatacagtcgcagaggtgatcatcatttctgcaatcgacacgcgacgccgctcacctattctaattagcgtcaattgcgatgaggctgcacacctaaaatggattgcttacctccagatacaccacggataaactggttgccaatcacggtgttggcagtgtgctcaatattgaacattttcagaagcagattggtcactttctctttgaactcagctttcgacacaccaaatgggcgctttccaggggtcttcgtgtcgagggcgaatccaagggtttgtttcacagtcaaggtgggttgatgaacatcatcctcttgattgtatacggcttctccgcggaatcttttggagaacgaatccgcgtcgaaaggaccatagagcacctccccatctaccccggtgtatccaaaccgctggttcgcgatcactttgaggaaagtcgtacagcctgatccgggacgcccaaggaccaagaccatctcaccaggccgtgtgagaccccggaaaccttccaatatgttgtactcctggcctttctttctccaaccgaagaggtcaattagtgttccgggtacattgagaaaatcgatgattgcatctgggaatgttttgatgtatgtcttgacgccgcccattccacgaactgacaggttattccagattacacctaggaagacagtcagtacttgtttatcctccctatgttgagtgtcttcggaccgatatgcttgtctttgatgccagcctcctcggaagcgacacgatcgccacggagagtggtctccaggtcccatgaatcatccgacgtagttgaaccctcatctttctcgatatcttcagtggtgactcccgtcttggatgctcgggattcttgtctagataatctgtgggctcggtgcgatatgctggagaattgtctgctcaaatcagaaaagtccttctcggcggtcataacatcgacacccgtctggatcgggatatcggccggggtgttggcgatgcgaatttcttccagctggcgtccatagctgtttgaatccaggatacctcattattcgccccccaaagcccaaacaaatgtgggggcaagcctccacggacggcatattccgcggtggagtgaccagatttgaagatgccaagcagacgggctcctaaacggggaaaagcgtgcaatcccagtcgatatgactcgtgatgagtcgtgatcactctgcagatgattacaaattcaatcatatcgtgcaggaaatctcgttctagagcaaacagcgaagagcacggatcgtttatcgacctactgttgtggagaagtaccaattagtgccctccactttacggggtataggcaaagacaacgtacaaagtacggagtacatatcattgaacatggatagaccctgcatagtacatctatgttccatatcgtgttgcgtatgatccgttcatagcggatacaaactcgcatatctccctatattgtactccgtatacatgcttatgcttggcaggaccatcaaagtttagacttccatttacttggacttaataactaaagcctcgaatactccgtagttgctagttagttatcttgcctctttgcaaaacaagaagacagtcgcaaatttattcctacgcgtcgcgccagcacccatctagttagctccgggatatctccgggtgaccgttagtttctcctgtctactccatagaaggccaacatttcaagaatctgacacgtttaaccttagataacccactttgctcatttataggcgaaacacaatccatgtctttattgggtagcatccacgtgcaggagatgcgccgccttgcatattcggagtttcgcgaccaatcaatgttcttgatgtttccgcaaaattacccgcagacatctcataaactggatttccaacggttcgagattttcctaatttgttgccgcttgaagtcctgttcactaagcgcatagcctaaaactaaaagaaaggccgaaagcaatcacgtgataggtggatactgattactaattatcaatctatttctcccgtgatccatggatccgtggagactagcgctagtgactaaaactttatttgttttgaacctatgtcgtaccctgtacagagtacaacagagtacaccttctcatacttgctcaagcgtagatcatggtatggcaacgggcgacaactccggcgccgatcaataaattcgccatccaaaactgcgggtccccgagatcgaccttaactccggccatccaccatgttcttggcaatctgcatcgccaccagagaccatatgtacagtacatactcatgcgcatcgcattgcgtgattgatttgagagatagaaaacaattcccttgaagccttgtccatggccctgggaattatcagcgtcatctgcagcagtctgcttatgaaaacttggccgcctgatatcagtatgaaaatgtagatgtttgaatgtgcgtgtgtatgaagaggttcaatcttccagttagactctaggtataccctatgaagatcgatcttgtaggtagagcattaaagaggaaagaggatccactcttgatgatcgaagcgaccttctacacagagtgattctcgcgaagtagatcattcaatggcctttacatacaatgttgtacaccataatctgctgaacaaaatccgcgccctattggtattgattccatcatagtagtaaaggggagggaaaaaatagcattcttcatcccgatcccgagaccatcgcccatcaatggcagctgtgatgccccttgccatcgacctttgcccactgattcatttgctcccaagccgacaaaccgacacagatcgcaatccgccataccattctacgactgagtccctcgcgccacacaccccagataagggtcagaatagaaaccgccagaaaagcatttcgcagtttctcgacgccagcagtggccaccgaacccgcaaagagaaaatcgaggacagcctagaaacttagtatatgcattcaataccatagtgacatgggaaatgacatactggtagccaacaacacgaagatgaaagcaatgcggagccttccggtagatatttaacgattaactgaaaaggtcttcgcagaagggagccgtcatggtctgggctagacttgcacgtggaattttcggagggtttttctgtggagcaatcgctgcatgacattttgaatatatatagaaaaaatggtctgggagaaaatgaaaccaggttatgaagctagactgtgatttgtatatatattgtcgcgggattttcgcgtcgtcggagaatgccccacagcccctggctttaccatactgcaaacaagtcaaaatacacctaattgggatgagcgctcggttggtaattcgtatttcttggcggttatacagattataaacgtgaggagtcagcccatactatatgtacaacagtgagtgtggttcccaagctttgtcctagaattctggtcttttgctctagcgcagcggaaggtggcacgtgacaataaagtcatctttcttctttatctgggtcctccgggagtaggtgctttctaagcgaatccaaagggcttgttaagtgcttcgctaaccacgtattagaatgccctactaaccggggcacctgccattacctgaagtatttcgacgtttctaggctcaagaagcataaggagcgggttgatcggcttgagaagtaggaagggagtttaactactagttttgacgtaaatacaattccccgggtattagttgacacggtgagcgggcccttattgaaccgtcattttgccagctggccgcttttaccgccttctttaccttactacacctccttagcaagaccatcgacccttcacacttgacgtttcaccatgacgacctcaaaaacacccgactcgtttcaagcgcacaaggccaggaagcgccttgatcaattttccaccgacttggaaacggccataaaccatgcgacaaaattcaaaccttatcgaaagacagctgtaatcgcctttcactgggagaatgatgatataggggtcgagcctcgagagagagaactcctagacgtcttcaaatctgtttatggatttgagaccgagagtttcacgattccgcttatcgagtcccagttcaaacttctagaacgtcttgtttcctggtcacgacgaagttctggagaagatacgctccggatttttgtttactcagggcatgcggggtttgctggaacagtggccagtcgctgggacttggcgtgagttataccctatctttaattctactaatgtatcccagctaacaaataatagcggcaaatgcgatcagtataccggtaacctgcaaggtcctaacctcaactggtgggaaattcgtggctacctcgaacaatacacgggcgaagtttgttatctttttgattgttgctccggaggatcaggggccttaagcgcgtaccacggcgcagagtttatagcagcctctacctgggatcagacagcagtgttgaatgtccatttctccttcacccgaattctcatcgacgagctccatcagttaaacggtcaggctgagacgctggctagtatctatgcccgaattttccgctacacacagcagaatcagattggggctgcaccaatccatatccctaaaccgaattcgccaagcgtgactatcggttgtaatcgctcaaggccggtcacaagaagcgtcgaccgagagtcttacagggtgctacttagcatcaaagtccgggaagagattcccctagatttcacccaatggaaagaatggcttactcgcaatattcctgctaacgttttgtccactaatgtcactgtcgaaggagcatttcgaggctctagtctccttcttttcacggttcctatcgagatctggactatgatgccggctgatgacccatcctacacatttattggacacgttacgtctcataatctcctgtcccaacgaccgactcaaacaagcacactaacaagcacactaccaatgcactctggcgctccatctggaagagaaaaccagccaccgcgaagccccaacagaaagccgttcggtagtcctaagcgttgaccatctcgttgaacaggcttggattgtgatttgccattccctccccccccctttgctttgtcttgacttgcttttccttattttcgaacctggataatgagttctactctactcaaaatggaatttttctttcttataattcttcttgaaaaggatccttcccaagcgagctgcgcagcgcagaacatatagtaaaatcgataaattataacatggtattttaacaaccaacgctttcattactgtccgatagcaattgataagcatttatagtatcatatatcagttttgaagaaatcgaaaacttgcattgttatggtatcgaaaaatacatcgctgaaccctagaaatatatatttctcagtcactactcattaatcactttattgaatccctccaaatcctcataagtggatggatgtgctccactccgaggttttcaatggctactagtaaacctggacaaagcgcagagcgtctatgccaaaaccgccttaatctgtgcctcaagtttcttcatgtcaccgccaacaacgcgattcacctccttgccgtccttgaaaatgacaaaggtgggcatagcgttcacgctcagttcccgcgcaacaccttgcagcttgtccacatccacctggataaaacgaacgttttcgtactgctcgctcagtttgccgacaacgggagcgacggccttgcagggtccacaccaggttgcgaagaagtcaacgacgacggggccggaggaagtgagggctttgaagatgacttggctggacggagattaggatggaataaattgcgagcagaatcaagagttacttacttgtcgatctcggtgacctttccgtgagacatgatggcggctgggctcgatttgcgtgacttaaagaagagacggacagcttgtgaggggttagtgtttggttgtttgtttctgttggaagtggtcgaaagctattggtggacgaaggtttggatcataggagatagtgcgtggcagtacttaccaatgtatatcgcagtgaggattagaacggtcttgagctccatcttcagatgtcggcggttctcaaggtctttggtggagcgtcgtgctatttagcgcagcacgtgacctgaaactatgccctatctagaggtacgtgatcacgacatttgaggggcaatgatgaggtctcaagtaccttgggggcatataagtgtcttactccgatcatgccaaatctgggcattggaaacttggcgagtttaatataacggcagccaccaataagcctcgctatctaccggacaaatagcgtgtgatgcgcttgctttttcacgtactattttcgaaggtctagaagcaaagctatgtacttgatacattccctttaaagctaattggtataaaatcttgctatatgtaatatctcgtcgacaaagacaagggtaatgaatatcaaaaagaagcggacccgggccagcataccagactatcttgattgcaggtttcgccacggtaatgcatccctatagtatccctcacgggccgagccataaagagctttgttatttcgcattttcgggggcgtgatccgttcttcattcttgcgaacaagaatagtcggccgcttatacgtctttttgggagtcttttatagctatttccacattatttgttatagctagaatgctagctgtgaaaacgactcaaaggaacaagacaaatttcccatgcacaagctttgataaggccttcggttgagtggaaggcaaattctcaaaatattacccgactttataaaaactcttgcatgatgcttaatatgtaggagcaacattagtttcggtacaggataaatctaattattattaagctcaagaagagtcgatgatccttgatcagcctcccaacgcgaggatcttgaactttggaatgttttcggtctgtaaattctccgactggcttagattgctgtagtttatgttatctcttcgttttttatcaggccttcgggctgtgaactagcaagcccccaatcaaaaaacatgtctcacattctttctaaaagctgtatatgtatgtttcggctctggaatgtagcataggagcgaaggtttcatatatactccggagtccgccgtcggtccatatattcatcgtgaatagccacaaactgaaggagcaagcaataacccccttctatacactcaaacctacttggcatggatttgcgacacgaaattccgaaaatagagcctgggttgagctctaatgacacactcaccgattccattacccgaaacattaccacaaaaaatgctccaagcacgaccggatcgatgctgcgtctttcattatgggtctcgtttgccgcatggatctcgaacttcgacaacggctacgccggtacggtgctgatcatgccgtcctacaaacacgcctttggaagctgcgtgcaagttatagacccgaatacgtatgccgaaattcgacattgctcattgacgccactacaacaatctcttatcagcctcaacttcttgttcgttgccattggaggtgcgattgcgggcatgaccggccgatacttcgggcgcagggggtcaatccaagctggatgtacattggctattatcggtgctgctggaatgcttggcaccagcggaagcttcttgcgctacatggtgtgcagatcgatcagtgctgtgggagttggacagttgattgtatccagcgtcacttatggttctgagtgcattgtcgccaacaagcgcggcctgtccttagggttgtataatgttggacttgccggaggaaatcttgctgcttccgcggtgtgtgcaggttctgctcgtctagaggcaaccaatgactggcagtggaagacacccattttatgccaaatacccttgggggttattctcggcgctgggattttgatgcttcccgagtcgccgcgctggcttatgatacacggtcgagaggaggaggcacgcagctcattcggcgtgctatactgccaaagtccatattcgccggaaatcaccatgcagattgatgatataagaaccaaccttgcaatcgagcgtgcaagcctcaaatctgtctcatgctttgatatctatcgcaggaagcatatcagccgtaccttgatatctgctatgatcatgattggaatcgccattactggtatccaatttgtacaaccatacgctgcactgttcctcaaaggagttggcatcagtgacccatatttgatcaatgttatcatcggcttgtgcatcctaggaggatcattttttggtccgttcattgtggaatatggcggaagaagaattgccatgctttccggctatattgtcatggctgtctgcatgctcactctttcctctgtgagcaccgctcttggaatggatacaagtgcagagatagttatcgtcgttcttctgtgtttgtgggcttttgtccttggtgggactattgctgcgagtgctaacctatcttctgtggagatgcacagcgtctcactccgcacttacggacaagccaacacaacagtgttctatggtatctttgcctttggtgcaacattttggacgccttacatgttaggtgcgggttatggggacatgggtcccaacgtgggctatttttatgcaggtgtcaccgtcgtcatcgctattttaacattcttgctcgtgccagagactgctggaattacactggaacagattgacgaaggttttgactcgggaataaaggcatggaaaacgtcactacccaagaatagagctattgcttcctctcagaaacgaagtatggcaggtggacacgttggagcttgatgaatgcttctgaagcgtggtcagttggctctgaatgtcataaaatttataaattatagtatatatagctcgggattatcaggtttgactctaagctctaaacttgcaacatcaacttccgatggatagatgatagggaattacctacctaaagtgcagagaagccaaatatcacgcagtacgcctcgaaccgcaatgatcacctaatatatatatatatatcggatctctgtccttttcgcggtttcattgatcccacctgaataatttcaatatttgacgcttttctcattgatacccatttctagtagtgcaaatatacacaagtttcacctttgctttggtctgttgaactaattgtaccgaagtgtccacataccttcccccgcctcccgccctgcgcgccccgccgcnnnnnnnnnnnnnnnnnnnnnnnnnnnnnnnnnnnnnnnnnnnnnnnnnnnnnnnnnnnnnnnnnnnnnnnnnnnnnnnnnnnnnnnnnnnnnnnnnngcgggtgcggggggggggggaccggggggggggataaaccttaactaagcggctcggcagcctccgcaaaccccgaacgaactacactaccttttttatttctcaaatcaggcgttgcgaattccgacaggtcattatggctcttacaaataaatattaatgtgtagtcacagcaacttttctcaccaaatgaattacgacgcgctgcgagctgtgagttccatcacatggctttcagcattcgcatactgatgatattagtgtgacctttgcttctcgagaaaggttgaagaagttcatcgagtgtattcactgcctagagactgatgctttcttgataggttcgctgtgataaacaactacattgtgcaaattgtaccgatgcaggcgttgagtgcagtcgtacaagagctcgacgacctcgccggcaatcaccatcggtgtatgttttcatatgacgctatttcgatctatgcttactatatgaaatagcatatctgctctcggggaaagattgttaacattggaaagaacagtttcagagtatgattaccattcttctttacttcaatgcttctgttgattgaccatttaggggcattgaaaatagaattccatcaaatgttactgatcattacgatggaaatatgccgtcgaaaaaaaggagattagagcatgcctcgccaatagaaggcactccgcaacctacccagaatgaatgtgccattggctcagccacacaccttgcagagaaggcaagaatcgttatacaaggagagcttgatggaaatgagtgcatggaccgtgaacgaaaggcgattctcagatctgccctgcagtttgtggatgttacggggcagaggagaagctcaattaccgacaaattttcgccattagaagtgtcgcatgaagattttcatgatggtccatttattgctccatcaccagagctgctttacatgcttcttccgggtataaaaagccatctgaatttcaaatacatacactaataataatacagagccaacagctaccatcggacgttctagttccgtacaatggccggaccacatctcggataaaacattggagaagatggcttcaaccattctcagtgacaatgaccttgagcatgggcaggaattctaccagtactgtatatgtgtttacgtgaaagccatatttcatcttttccaaaagccgagagcatatatggatccccgcatcaacgcacaatttctgaagtccaagaaactatatgaaacatatgccttccgtgctctcaagaggctcaatttcttgaatgccccaactcttcctctcattcagtcgttgatatctgccgtatgttatcgtgcttccttatacgaaaagtcacttattgataactattgaacaggcatttttcatgcagtatcttggcaacatgagtcaatcctggattttcaactcatatgctgctcgtttgataactgctctgggttatcatgaaattcgcaatccgcctgggatgtcaaacctcaatgaagatatctatagtgctgtatgctggtgcttttaccttgaccgaactctgagcacccttctttaccgaccattgtcgctgcccgagccctgcatctctcctgcaaatctgattagcgccgaccaaaatttgccacatatcccattaatacgaattctgttcgatctagctcaggtccaaggagagctgttgaattgcggaaatgcagataacactcgccagataatcgccaatcattcaagacttcaggaacgaatggaggtcatatattcaagattacaatcagtgagtttgactaaatgtctgccttccttcaagctaacttcttgttttagagtcgagtcacagcccctgactgtatctctgcagattggatctcaggcgaattttgctattacgccattctggttgatatccttcgatcgcgcttaaaatgtgcattttctcctttgacacacaaggaatgtgtatcatattctcgcaaatctctcagagcactgcatcatcttcagaaaaatctcgcggatgttccaggcttcgtggatccttatccctcattcctgacatggttagttggtctagtttcagggttataagttcttccactgatatttcctcaggactgtccttctatacccattcagtccattcttcgttctcttttgcaacatcattggagaattagacatggatgactacaatctaatgcaagaaatcacacaaagtctatctcagttcgccgcaagtccatacatctcaaaactgctgaaacttctgtactacttgcagaatctctgcgtaccattgatccaagccaagcagcgtatgggcccgcaggtcaaagttcctacattgtacccttcgatggctgggacctggcatgtgggcgatccagctagtgatgaacattcacatctcttgatgtctagctctccatatgtggatcctgtcgctgaaacaaaccttcaacaactacaaacaaccagtgatggaagctatgcacctgatgatgcgttgatgtggcaattattcaatagccaaatctcgctggagtggttcgagtctaaccctttttcttattgagaatactcgaaacttctcatttccttgtttatatatagaaaagttgtctgtacgatttatgcttttaattttatatacatctaaaacttaaaaaaaagaataccaaataaataaatgacctcatgcggccggctattcttatttctaatcctttgatttctttgcctttttgtttcacgactgcttgttacttgcttgtctgtttctgttcagattttgggcgcatactataacaatattggcatgctattgccctaaccaatctaggttttccctaaatctctagagttattttggcgaaaatctactgtttcccaactccagtcattttatatgtactagttagttgtggatgcgtacataatagtggggccaatatggctcagcctctcagcctcagcctcaagtgtggctgattattcacagtcttagactgaaggcctattacctgttaggtagttatgacagtttcatgagacgcagttgtgatgctaagccttcttatgactcaatcgcaaacagagggcatttacctaggtacataatacataatatataatgtatgggagccattgtcggggaagaatctataccaatctgaagacatctatatatgtctcacttatagataacacattacacattcaagtaatattggaaatattcgcagacaaccgtggacatccaccatttaatatcattccaacaacctcggaataccagcggacatagtgcaggtcgtggcaggtgaaccccgttggcggtggagacagtgcctttagcgtgggcgcagctgattccaacacacctcaaatcttacccccctcaaaacaacctcctagttttgcatctttactagacttggtttctcttttaccaagactagtatatcgcgctctacggtttcattggggatgcccagagtcagctcttcggcagcgtgttactggcccgcgtggtcgttcccctcattcttgaaatcagtctgatttgctctggactagtcactcgttttgccattcacttgagtgcccaagacttcaccccacggtcctactaaacaatctctcgcgcaattctgggcgcgtcgagtagagccgagccgagtcgacatctggtcggacccctccgaaatcatgtcgcaatatccaaacggtcaacaggcatactatggccaatctacaaacccccaagcccctactcaaccatccaccggccactatgacaattatacccccgcgccggacagacatctgcctcgaaggatgccgagttacaatgccggggatgattctggattcttcaaccctgtccagacccagaatatgagagcgaccgaagaaaacagccagtatgcagcacaaggcggtggttatggtggcagcgcgggacagggtggctacaatgatgtgcagagagcccctgaagacgacagagactcgagatattcgcggacttcctcagacgccatgtcgcgtatgtctccgagtcgggcctcttcgcaaacctccactatgtcttatcaataccaatactctggagcaccctcgtcccagacggcctacaacccgcagcaatacggccttccacacacgcagtcgcaaccggttctcgcttataacccccagacgtacactggctccagcaatgcttcatacgccggtcccgccttgggccatcaaccatataatcctgcggcataccagtctaccgcaatgtcgggaatgagctctccggttctacctagaaggcagagcgcagcttcacactacgggcagacaccgccgactccacaatcgtatggcttttcccaacaatcaccgcttccaccgccaaggggcgccgatcatccgtatggaggacgtccgtaccaacccatgtcaccggtcacctcgccttcctatgttccctcaagctccccgggcataatgcatatgcctccgcctacatcacgttcttattacagcaacccacaaggggcgtcgtatgatctgccatctcctcggtataccccagcgatcccaagcggttccttcgaagagcagcctccggcgcctccagttcatcagactcaagcaaatggcttgtacggcaagcggccaagtgtagcagggcgaaccctgccgacgccccctgtgcagctagacttgcctcaacatccgaggcgaactgagacgttgactcgacacccccagtcccggcctcttcctggacccccagtcgatgaagctgggctagatggcaatcgttggccagcggaacctcctatggcatatgaaaatgtgctcagagaagatgaggactctcagaacttttcccgtcacggctctagagcatcccatgctagctcccattcacgcatgcagttcttgccggatgaggaacaaacccacaccaacggtaatatagagacagacactggtcatatgataaatgacgatgcctacagtgaggaaagcgacccagaggctgctgctggtttgattatgttgcaagaagacatagcgcgtgaggaacgtgagaaagggcggatgcgacgtgagaccaatgcgtcagttctcagctcacgtggatccaacatatcgccaagagagccttcaccgcactctgattcacttggagataacgagttcatcggccatgacctttcgcaggacgaagggggctaccaagcaaacgtgcactacggtatttacagttcggaagagtattcggaccctgccgcgggcgacagattcccaggcacctctggttcattcagaagctccgggtcccccgatgagcgtggggagtattataatgattacgagcacccgcctattgcatatgattatgccaggcgcctccatcatttgccggccgatgccagggtagatgccagtggtactgggggattatcggcaccggatgcctattcccgacggatgagctttgactatggcgatgaaggagaatcaccatatgatcacacccattctggagatcaatccgatgacgaaagcgcccaccgatccgcacacgaagatctgttcttccaccctggaatgcgtccattgccaccagcacctgtagagcctgctggtaatgttgatcttgtgtcacatctgatgcctgcgggcacatataaccgccactcggagcagcaagatgacttggacagctattcacagtataacaaccccgccttactgaactctgcggattcttatggcgaggctttgctaaaccagtcccaagttccgcggtcgtcatctttgtcagctcccattgggcctcgtactgatgcacccatcagatcgaagaccgacgcggaccggctcagatacaggcagcagcagcaagaacttctcttgcagcttcagcacaaggacctgcctcatatcgacccagcggcagcagctatgacgctggatctgccaagcatcccggctggccggcgcaagagattccatcctgcaaagctgtcatcggaacaattcaagaagtgtaccgagccgtgggctttgagctctctcttgtcctggattaaagatctgagtgaggatgaaacagatctcagagagcaagcaattgccgatgccatggttgcgttattcactcacaaagtccccaccatgaatattgctgatgccgagacactggctgctcgagttgtgagtggcatgcttgaagaaggtgcattggtaaaagaagaagaatgggtcaagtttggctcaggcactctttcgggtatcctgttccagatcactggcactggatgttactctcccaggctccacttacatgagatgcacattgagggtactgatagcttcggtcgatgctactctcatcactgtatgcgaacattgaagaaggtcaacctcaaggcacagatgatggcaccgcagaagaaaatcgaggactgggtcactttctacaaggtccccaaggaggtctgggaagctcatccgaggaaagaggtcgatcgacagaacaatctgcacgaaattgtcactacagaagactcctacatttcacaactggatgtcctacgagaactatatcgtgatcaattggctaagatgaatcctcccatcattccggtgaagcgattacccaaattcttggccgacgtgtttggcaaggttgatgctgtgaagagagtcaacgaggatttcctgttggcccagcttaaataccgccaaaaagaacaagggccttttatctctggattcagtgacatcttccgggaatggattcgcaaagctaagaatgtttacatcgactacgctgcaaccttcccaacggccaactatcttgtacgcaaggaggctgaacgcaacccgcacttcaagcaattcctaaaccaagcccgggaacacaagctatcaagtcgccttagctgggatactttcctcaaagccccgatcaccagaatccagcggtatactcttctgttggcgactgtccacaaaaatatggtcaaggattccgaagaaaaaggaaatttggcacaggccattgaagaaatcaaggtcgttgcgctggagtgtgacaacaaagtgggagagatgaacaagaaggccgacttgatggagttggcgtccaagctgcaattgcggcccgacatgaagaaggaagttgaactcaaccttgaacacttgggtcggcagatcgtctatcgaggcgaactgcaacgtcctggaacccgtacaagattccttgttgatacacatgccatcctgttcgaccattatctcgttcttgctaaggtattcacgatgcgcgaccgggcagtgaagtacgagcgatacgatatctcgaaattgcctatcccaatggatctattgggccttgaaagcaccgacgatgatcccgtggtcaaatcatcggtccggggagtttcgactgtcacaccttcccaagcaggtgctgccagccctcttgcacatacagggtctggtgcttctggaggaaacggtgctcttgacaactcaagggatgacaagattctataccctttcagaatcaagcatctaggcaaaactggaacatatactctctacgccttttcagcgcaaagccgcctggaatggtgccaaaagatcatcgaagcgaagacaaagcatgctgctgctctcttctcgcaaaatgccgagccattccgactgcgcgtgcttgcggacactgcgttcgcatactctgatcatacacccggctctaaaagtgtcaccatcaagggcacccctctccatcgtgcgattgtggaggtcgagaaacaatatgaaagctctaaagctcgccctcctgcgatatgcaagactgcagtcaactgtgccacggtgttccaacagccacctgggcggattatgtgtgcaattggcacggactatggagtttacatgtccgagctcaataaccccaggggttggtacagggctattcccatcacacgggtcacacaagttgctgtctttgaggatttcaatttgctgttgttgattgccgatcggtctttgattgcataccacctcgatgtggtctgtcccgccaatgggaaaacctcccaatcatctcaggattctgcccgacgagcaccgcagaagctgtctggaaatcgtgaagtgggcttctttgccgctggtcgcctgaaggaccgctacttggtcttatacaagaagcgtgagggtttgtcgtctacgttcaaggtatatatattcgcagcaaactcgataaagtaacagcaaactcacatacaaaatttaggttctcgagcccgtcctgcaaaaatcatccacaaataagggccgcctgttctcacgtcgctcgcaaacggagttcttccgcgattacgacgagttctacatccctgccgagacctaccgaattaacatgttccactcctcgcttgccatctcaacccaaaagggcattgaagtcctcacccttgacaagaaactttcatggtctgtcccagattttagctccaacgatactggagatgcacacgataccctccacagcattgccaatcgcatcagcgggctcaagccgctaggcatgttccgtctcagcgagagcgagttcctagtagcttaccagcagtgtgctgtgtacgtcaacaagcacggcgacgtctctcgcagtgtagtcatggagttcgtgggcagcgcacacacagcctgtctctatggcaaattcctaattctcttcaacgacgacttcgtcgaagtccgcaacgcaatgaacggtcgcttacgccaggttattccgggccacaacgtcgtctgcattgacgacggtagcaaggtgcctggctcgctcaacggcaatgcacaagccaacatcggtggctcgatgggtctttcaagcggcttctctggcgcggccaatggctccccgggccccacgggcatgggcaacacggtcaaaatctgcatgcagcatccagagtatgagcgaagccagcttgtcttggaacttgtcgaaaatgaggggcaaaaagactaagtcaataccagtcgaccgttttggggtcgccctgcctcatattttggtctcattttgggtttcatacttctcttggaacttcacccccttaccctttctcttcgctttttcgtacacctttcattcacccctttttcaacatccctttctacttttgagccttttattctccgccgtggttacctttcctctatagagggtggcccgattcttcatgcctatgcttgttttataccctttttcttcctctcttgcgtgtcacacaatgccattatacttctacgtcgaacttctacgtcgaaggttgatggtgattgatcgcttccacccctgggattgttccagtcggctcgatgatcatgctgtacatagaaaacgtcactgcatctcatgacttgacgatttcctgaattcagaacactttagtatcctgggcgactttgcccctacgaatttgattagtggaaacattcaggtctcaaatctatcttttgatttcgacatatttattcgaatcgcaaataccatgtaggatttggtacatgtacgaagagcgctacgtcgaatccacatgtctaataaacaagaaaggttcattctttctaagagatctagaactccaggttccaatccaaggggaaccacgcaaaaagtgaattgaaacatccaatccaagggttgtagtacaaaattgcataacgatccaactaaggattcgggaataagaaaaacagatgagatagcggctaaccgtatatgaaatgagacagtatgcaagaatatcatgagtcaaactcgacgagcttgctgataacctctccatcgcgggccgtggaagaatcaccgctcttagtggaagcagcagagccggagaccttccgaggagcgtgggtggcatcatccttcccgtccaagagagaagttctctcttcctttccgccgccaagcacctcagctccttcaaggaggtcacggtcagcgtcacggacaatgctacgacgttccgggtcggcgccgtatgcgccagcgccccagctggggataccaccggggatggcggtggcagtgttctcacgacggggatagtcatcatcgtcttcatcgtcttcttcttcctcgcggccgtgagcgagatcacgctgcgcctcgtccattcgcttcttgacttcggcggccatgcggattccgtcggagacgatgttgtcgaggacgccgcgcaggcccttgcctggtggcacgatacctcctgaggcgccagcgacgggcgctgagccagcgctgagtccggaggaacggacactgccgatgttggagaaagttgtgagattggacgacattgaggaagatgcggctagagccgcggggtggggggggtcggacagatggaagggttgggggaagtnnnnnnnnnnnnnnnnnnnnnnnnnnnnnnnnnnnnnnnnnnnnnnnnnnnnnnnnnnnnnnnnnnnnnnnnnnnnnnnnnnnnnnnnnnnnnnnnnnnnnnnnnnnnnnnnnnnnnnnnnnnggaggggggggggggggcgggggggtgggggtggtcggacagatggaaggattgggggaagtaggattcaaagaattgctctaggagttcgtcggccaggacaaccattcggaaggtagggagagtgatatgcaggggattattagggtcgagagccgggttggcagactcagatgttgagcggttgtggtcgcgactgtctaatccgacggtggtagacttagctgactggggagctgcgtctggtgctggagagttggtggacttggcatcatcaacatcgatcaaatcttcttcgtcgtcgtcgtcaccaatggcaaatgagtctagcttctcggttgcctctactgttgtatccagcaggtctgcttggtggttctcttggtggctagggtcggcgtattcgaagcaacgacggatgaatgcgctgacgctaccgaggaatttctcgtcagtagtgagcgagttctcaacaaagtcacggtctcccgacaagttcagatcttccacagatggggtggccgtgattgtgccctcgaacccacgccgggagagaaacaacagcgcctcggacatcttgaggatcccctcacgatcaacctggccatttccactgtcatcgtacaggtcgaagaaatagttgatgttattcatgatatcaggggatcctttaaggcgggcaagaccattcaccacattttgaagattcaatccctcctcgggatctgtgccccacttgcggtagaggcgttgcataaactcatggtccgctggctgcctgcggttcgcccacaatgctgattttcctgatggggattctctcctcgagggactaggggagtcagcaaccgcccatttagatgtggcggctaaaaactcccggaaagcatcataatccatatgtgtagggctaggtccaaggccaacacggccaacttcggtgtctgcaggaggggcaagcatggaaaggcgttgggatttcgatttcttcctctcttgccgcctcgcctcttcctcgataactctctggtgctgttcccattggtacagcgtttcatagaagcggtcatatatcgttccaagatcatccacgctcaggcgtttgctctcgggtccaagattgcggatagaagtacgctttgcaaaagtctcgatattctctaagacagcacccttgtgcttttctcgcgtctcggtgatcgtgctgtgagtgatgccagaaaattctttgaaagcaaccaccattaattcctggaatctagtaatagcccgcagcttgggattctccgatctcgggtgggcagattcatccaatcgggaaaaatatgacttcaagacagaaataaatgatccgtcatcttgtgtctcgagaagctcctcgccgttgactcggaggatggcaagaccgacctggaagaggacctttggcccttctaggaaaaacacatccaagacacggaaagcaaagacgagcggcatagagttaatgtagagagaaaggaaccatggcaacgataccacagaaagttgtacgtctgatttggtgaggtgatcccagagaaccggcattgttttctcaactaaagactcaaacaccttttgatcgagtagtgtgccgtacattgtggttgaatagtaaccgggcaggagacggtcacagagcacagagagaaggaaaaaggcctgggcctctgacatatatctggtcaagttagcaaaacgccctcggcaacttgggattctaaacatacatcaacaatgcggcaaccacaatgttcatggcttggcaatatccaatctccgggtcaatccaactgtacgcagtgagaactcgtcgcaagcgtccaatgccttcttcgctctggaatccaggatactctggaagactgcgattcaaatctttctcaatctcatcgatggcaagggattcttgtccctcgaacttggccaatgtctgttggtacagctttggagattgtagacgaaggaacaaagaaccggatgtgagctcccatatttctcctcgtagccgatttggcaaaccaactctgattagcttgtggaaggttggttggcgaaccaaagtagcattccgaccattttctggagaatatcagtcacatgtcggaatatacaatcaaaaaagaatgtctttttacctctgaaatattcgccccaaagtctcatcttactgcgatcgcgcagcttgcgtgcatcaccagggtagcggaaaattagacccagccccgcatccgggggttgacgagtatcagcttcgttcccgtcttgtccctttcctttggcgcctgagagcaaatattccgaataacaatctgagacgacggtccgcaagctgtcaacctccttcattgcctccctcaggcctttttttagtgtgtcacaaaatcgctcgcaggcctgtctgctaccgacaagctgcaatatgaggcgttgaggggcgaaattgggttcttgatgcttattgagcaaaccattccatgttgtcagcgccaaagagaaaacatggctggcgctatgaaggcgttcgacacgtcgtatgcaggatagcgggaggatgaatccattgcctgatggtccagtgccgtgcgtttggccagtccaagtggtcgaggcacttgctgtagcagatggaatgaagctcgtgggctgggttgaaaagcagatgaaacgttcacttagatgcaaacgtccagtgtatgtattcccagcccggtcaaccctgcgagtgccatctccttggtttgacgaggaatttggtagtggtagaacgagatcagcggtgatctcttgaagcgggttctgggaatcagggaggcggaattgttgccggaacaacgatgccttggaggggttatgatcgggcgaggatagggcggaaatgttgaaattggcagggtcaatcaggctctgggccttctgaacgaaggacgaccacggtatcatgttggagagatgagggtgtgaattcgataaccaatgatgtcggaatcaagctcagttaaagacttcgagttcagcagatccgggctaggagtaggaaaaaaagcccgtgcgtagttgaaattggagcttcaaggtcatcgtacaagctaaatcaaccttggccgaggactaggcctgcagaacaagaggattgcgtcgagtgttgttgcggattgataagagggggcgtgatgatgctggtttcacgtgactgtcctcagccttatccataatagcttggcatcacagcattcttcgaaagttatacgtggaaatgtcctctacagtaattattcttttcgccattctagccttagatattatacaatcagcgctgtaggtcagtggctataaggggagggacatctaccagagattcaaagatatcgtacgcagtgtttacatttgtctaactatatataacgagtgtgaagttaatttctagttctataatatgccccactgtgagtagtacaatggtctacgatcctacagtctacagagaagagcctaagaactagagattctcaatttatgaggcttagttgagatgaatataaacactgcacaagaaacacaagtctgagacagaaggacgcaaacatattatgatcggacaaaaatggggaattgaaacacaatccaagcttgacacggaagcaaaaacacacacatttgaaaccaaagaaaaattgagaatagaacaggatttgagaaatcttaatagagtgaaagaaatatagtgaaagaaaatatcggaatcaaacaggatgtaggtgaaatagaacggtgaaatagaacaagaatagcgaacaagagaagatttaggaacagaacaagaaacaagattggaataaaaccaagctcaacgcaatcactagacattgaaaattgactgtgggatagcctagtggtgtcaagagggccttgtaagaaggattgaacatgaagaaaagaaaaagagcctggatcggctagtagcggtcacagggcaaaagacagtggaaaatgaaattccctttgttcttgtcaagtgaccggagctttcagttggcggtggaaaagaagtggagagcccagtatagctggtgattgatggacatgccatgggtcaaacgacagcggaactttgtggatttgtttgtttgtctttgttcgtgtcgatgaccccgagtaagatgggcttagtgcgtgctggcccattggcctggcaaatgagtggaaagcctaggcagtctggcaatgagatagctgagcgttgttgtattttttttttactttgcttgtggttggtcttgttcctgcttgatcttgtttctgtctttatgtagtgaccggtggggggttttttttttttttgttggtattgacctcgtcaagtcaccgttggcgccagagagcttgttgttgtccggagtgtcgttcaagtgaaagatattgaaaggtccaggtagcttgtgatggcctttggtcgaaagacggcttgaaggagtgcattttgtattttcatttgtgtttttgtattttttttgtattttttggttcagtgatccgcgggtttgggctgtccgtggaaggagccgagaaacccccaagtataaaatcgagcactatccaggcaggtcgataatggccttcaaacaagagacagctggcctcgatgggaagatcagtatgtccctttttttttttttttccctcctctttctctttcccttttcgtttttcttctttttttttcttttctttctttagttcttgtcgagcgagcctcggacctgcgaaggctctgtgtattcaggaaggacttcctcggagggactggtcataagaccctgcttttcgcaggcctcgccatcctcccaggcggccttgcgctccgaagaagtggtaccgcggtagcgttgccagaggaaaaccacagcctggccgaccagcatgccaatggcacttgcggtcagtccagccaggacacccaaaacagccgggacaatgataaagtgaacgatacgtgaaaaagtgcgggcgaaagcgccgtggtgcgggtggtgatggtggggacgagcggagccgtgggcgtgggcatgatgaccaccggggccgaacttttcacgcccagaaccctccttcccgaaaggaggcgggggagggtaaggcatatcgtcatggtcttcttcgtggtggcccattatcttgccctcgtgtttgccatggcagcccttgtggccggatttggccatgcccatcacacgagccttggcgccagccaagaggccccgaatgcgagagaccagaagttcttgcaggcatttggccttgccgtggcactccttccaagacaggcgatcggaagcaggggtgttgctttcgatttcagtccgagcgatgaagagctcgccgttgggatcctgtaggacggtgatcgccacagtatcgacagggacggggtgggtttccaggtcgagaacagtgaatcgaatatctaggagttcgtatcccggctcgtcggatggtacggccatcggcatgatttcaagcgcatacccaacaggcatgggggcggagtcctctccctcttcattttgttgcacagcaagaatcgggatgggcggagccggtgggaatatttggcggccgttggccaacaggcggttgtcctcgatcgagaaatccagagtctatgagagtttgttagccagttcgaatgaataaacgcattttgtcattcttaccagagatgatggtttgccctccgtccagataacagcaccttcgtcattggtttcacgaagaggacattcagagcaaggcaggtcaacaatcgcatgacgaacgtcctccagaagcatagggtggatattaacaaatccatcttcaataatatcgactttaggttccatctcggggacgaccagcatggcactggcgccgagagcagcggcgccacccagcaaaagggagcgcacaaacatggcggtggtaggaaatgatgcttaacgcaaaatgaaagtcaaaagcaaggcgatgcttctcttcttgaagttgatgagatgagtagactcaataacgatgtggtgaacaatatctcgagggggtagataagtgcacttatcttctttcagcgggatgtggagtgggtgacgccagctcctgcgtggctcgtgctgtcattggtccactggtggacagtcagcctgctgactgtgcaggcggcatctcccgggcttggacaatcgtgttcttattcgtaggctccagactgaacggcgacataccgaggtatatcgttcccctgatattatttaaaaatgaggatggcgaggactccagtcctatgcctatcgggtatgcattcgaaatcatgataatgtctgtgcgatacattcgcttctagctaccaaaagttggcatgtgctgtggacaaaaacatggtactgtggtatacgttccgaggtgacgaaacacaacctcgatgctagcgtgtgttgctagcgtgtgtttttatccaggcgcgaaatgcgcatagtccgcctggtgaacgtgcaggaggcgcagtttgtaaccgtgccacgcttaggtgtatactgcaatatcatgttttcgagtttctgggagatcatataatgctcccagattccggagctggcggttgttataaattcgcatggtcagcctgctgaacgtgcaggtggcatctgtgctatgttgcctgcccctgggagctcatttaatctccccatctcccagaggctagctgtcattgctgaaattggtttgttcagcgggccaactatgcagatggcacccgagaagcctttgcgcagtccacccatagccgactccagaggtatggctgtcgctggattttgctcctatgccatgatgctagctcctgggagattaatgatgttcccaacccccaggagctggcatgctgttgtttgatgacggcatcggcacggccagcctgctgcacatgtagacagcattagatcgtgttcatgccatattgccagcctgcagaagatcatataacgttgctacctcacacaggctgccttgtcgttgggcgaacaggcttgttcagtaagccgaccgaccatgcagccagctcccgagagatcatacgatgccccccatccctaggagctggcgtactgttgcaaactgcatggtcagctagcgaaacatggagatggcatcatatgccgcgtagccagcccatgggagatgatatgttgttccccgctcccatgagctggcctattgttaacgcgatgttgtcaaccactaggagatcattgatgtcccaatatcctgggggccgacgtgttttgagtgaatcggcgtgtccagcaggccgaccatgcgatcaactcctaggaggtcgtgtaatgttccccattcctaggagctggcgtgttgttgcgaagcgcatggtcagcccgctgaatacttgccatattgccagcccctaggagataaaatgatgttcctcatttttaggagctggcgtgttgtgagtgaattggcgcgttcagcaggctgaccaggcaaccagctcctaggaaatcatataatgtccccatcctaggagctggcatcttataggtgaattggcatgttcagcaggccgaccatacggtcagctcctaggagatcgtacgatccctattcttaggagctggcgtgctgttgcgaagtggtatagttagcctgccgaacatagagatggcataacgtatgccatgctttgccagcccctaggagatcatatagtggtcccatctcctaggggctggcgtcttgtggtgaatgaggttcagcaggctgaccatgcaacagctcctaggaaatcatataaatgtcccccatccctaggagctggtgtgcttttgcaaactgtatggtcagcctgccgaacatggagatgacataacgtatgccatgctttgccagcccctaggagatcatatagtggtctcatctcctggggtccggcgtcttgtgagtgaatttgcgtgttcagcaggccaaccatgcaacagctcctaggaaatcatatactgtccctctcctaggagttggcgtgttgttgcaaagtggcatggccagcctgctgaacatggagatggcataacgtatgccatgctttgccagcccctaggagatgataatggtcagatctcctaggggctggtattttgtggtgaatgagcgtattgggcaggccgaccataccgccagtccccaggagatcatataacgtctccctcctaggagctggcgtgttgttgcaaagtggcatggccagcctgctgaacacggagatggcataacatatgccatgttgccagcccctaagagatggtaatggtcagatctcctaggggctggcgtcttgtggtaattaagtgtattcggcaggccgaccatgccgccagcgccgaggagatcatataaagtctcccttttaggagctggcgtgttgttgcaaattggcatggtcagcctgccgaacatggaaatggcataacgtatgccatgttgccagcccccgggagatataatggtcatctcccagaggctggctaatgttgccgcggcgtgttcagcaggccgaccatataggcggcattttttgtgccatattgccagcccctgggagatcatgtactgtcctccgctcccaagagctggctgttgctgaaggtggcatcgtcagcccgctgaacacgcaggcggtagtctcaatttgtggcgtcacaagtcgtttccatgtgcaggcaaaacgacgccaatcgcacatcttctacctagtttcctgggtagccgaataatatatacccgaatataatatatactcaagggcccagacattgtactcgaacaagacgtctttcgacgacaaaaaaatcacacttcgccccgaagggtgaacaacaaacgaatcgtacatgttgtctttcgacaaccgacacaaacaatcatacaccaccacgaagggtgggcgaacaagaaaatcaaacacaactcagaacaggtaccccgataaaatgccatgggcgtcgacagtgataatcatccatcaccttcccgggtgagagaaacaggggtactcaaacaatggcttcttatttcggtgtcgttggtaacagacacctgtcgctgtaactgtgcaggtgaagtggcaatcatcggacttgccagcttgctgcattgtcttttgcggtcccaagaggtggctcattcgtccctcccctcgggtcgctttcgttgtacttctgcagttgaagcggcaatcatcggacttgccagcttactgccttgctgtggtagtattattcatcaagaggtggctcattcgtccctccccttgatgggatgcgcaccgcaccactttccgttaaccgaacaacgcccgatcgccggcaaaacaacgaaggagaacatagataatccgatcgaagattggaacgtcatatccgtgctcccaacgcagttcctccaggaactgttcaggaccctccaaggcgtagactaggtgtccaaggtgacctgcccacagggggaacgacagcaaaatcaccatcaccatagcaaatacaccaaaggaaagtcgacgagttcctgtccacaaccccctcagcaaagccgacccttcatgcatgtctgactcgtcagacacagtgacggcgggtgggtcggaaggccaagctcctggcatttgaagaccagaaggcgctgctccgcccatttcctcccgctgttctcctgtattctgtcgagcgctgcaatttgaggtttcggcatcctcgaccctcttggtgcctttcgaaacccccgcacgggaatctgtccctgttgcaacggcattctttaccgaagcgtcttcgggactggcgaccagggaaggggtggagatagctcgagaggttgctgtgacctgcaacccctcaggagacgacataatgctaggacgagcttgagtccttgccgcgcgcgcctcaagcaacgcatctaggtgcgagcgagtaactgtccgcgggctcggaacaagttcatcctctgtctgccaagtcagatctgattcattccgagtcggcttagtagcagcaggcacactcggaatgtcctcgactgacgatggctcagtttggactgactcagttggggctggctcactaggagcaggcgcacccacaacttcaccggacaaagtgaacacggatgattcgagcgtagtggactcgggcacagtggactccaaggcagcttgagttggctgggaaacagctggctcgctcatcactgcttcgggatgcacatgcacggtcttgagagtctcatcttcctgcgatgcaacttgagtcggctgagaaacagcgggctcacccaagattgcattgataggaacctgctcggtggcctccaggacaacttgagtcggctgcgaaacagctggcacactcatagctgtctcggtgggcacctgctcggttgagacagtctcggtgtacgccagaacagtctgagttggctgagaaacagctggcacactcatgactgcctgtgtagacacctgctcggcctcaacagactcggtggactccaaggtggtctgagttggctgcgaaacagctggcacactcataactgcctgggtgggcacctcctctgtctgaacatgcacaaattgagctggctgcgaaacagctggcacactcatctctggcacattcgcggctgtatgcgtcaacttttgtttcttccgggctggctgtccgtcctcgctggacccaaagatatcagctgtccgtttgagtactcttcgtacagagagatagtcaaccctccgatgcacgcgagggcggccactcccgacgagacgatcccgtcgtttgaagacgcggaagcggtcgcggacccttggcataccaggcttgagagggatggctgccacggcctgcgcgatgacgcgattaagtgatcgcgtcaatgggagagacgggggagcgatagcagcatgaccaccagatgactagctcggagccgccaggtcatctttgttgtacagtgtgatcacatgcgtctgccccttatcccattccatgtgaccgtcaaaggactcgtcgttcaactttgcgacttcggaataaaacagctcgtcgtcgagttccatcatgtcgttcgtctccacttgctgaggagcgatagtcaaggtggtagctagtgcttcttgcaccactaccatttcgtcgcacacctcggcctgcaacatcccagcaatttcttgtcccgtggtctcagtactgatatccacggtctccacctgctggggagcgatggtggcggtggtagctagtgcttcttgcaccactaccatttcgtcgcacacctcggcctgcaacatcccagcaatttcttgtcccgtggtctcagtactgatatccacggtctccagctgctggggagcgatggtggcggtggtagctggtgcttcttgcaccactagattatagtcgcccacctgcgactcatctgcctgcaacatgccggcaagttcttgtcccgtggctgtgtctatgtgtgacccagcccgtgatggtttttgactgatcaatgatctagtatcgtcccggcgcgagcggaagttagcgtgtcacggtccccagcgaatcgatcgagggacgattcgcggacggagagagggaataccagtagaatcatagacatcggggctaaggtcatcacattcgcgatcctcaagggggagcgatctcgggccacgttcttttcccttgtcgagctgctgcgggtgggggtcgaatgcctgcccgtgggagcctggttcctggctttccacgacgtggcggcgcgcaatacccacagggctagccgaggactcggcgctacttgccttccgagtctggacctggcttacccttgtgctttgcatactcgcggcaagcattctatccgcattgtcaaggaggcctttcagtcggtcctccgcacctgcaaggcgtgcctgtcgttgctggtttcggccggccgccgcaaccacctggcaaaggtcccgcaaatctgcctggtccctcgccagcttctccttgcagtcgcggagggcctttttcttgccctccgcttgctccaggtcaacagatacctgctccaggtcgtcctcaataacctggaactggcattctatttgcgaagttctgttggagtttgcctggttgatcatggcctgcatctgctcatgatcgagaagcttggtggtattgcggtcttttgccatttgggatcgcaaagccgacgcctgggacctggcgtcgttcagtgcgttctcctgacgagatattgtcgcttcggcatcagtcagtacttccagcgcgctggcttcaggctgtttctgaggtggtcggataccggagggggattgaagggctgtgtcggggcccaccagaggggaggtcctgtgcggaggactctggggaaagtaggaggggcggtaggtggatgagggacggtagattggtgaaggtgtggccgacgaaggaccaggcaccacctccgtgccaatgggtccattgcggggaggacggtacatggctgtcggggaaagcttgtcaattgacgaaggaccaggcactacctccgcgccaatgggtccactgcgggaaggacggtacatggctgtgggggaaagggtggcaattgacaccgggccaggtaccacctgcgtgccaatggatccattgcgggaggggttggctgaggcgatcagagggatggcgggggtgggggcacccgtcatttggaacccagtgacgctgtcacggcgacggcaggtccgtttctgttggtttgccattgcgagctttggaagatgttagaagagaagctggaaaaggttgcttgtgaaggcaactgtactcacagaaaaggggatgaaatggcgcaggatttggatgagagtctcttctcaaatactatgggataaagtgtcagaaacggcagataggtcacttggaagagtggttgggactaaccagaagaagtacgtggattcacaaactgtttagtctttgcagatgcagacgaatatgaaaaccgagtacgatgtggaagaaagagagaggggaagaaagaaagagaaggtgtgtgggaagggcagaagatatagccctcgacaaacgacgtgactcttgaggcccaggctcctcaatggtcaatggcctgactcaatgactaggtcttgcctccctggaccaatcaacaggcttcctcattgtttgtcaatggcagggtacttcctcaacaatggctattatgacatgttcaataaagagaacaatgggttgtctccttggtgccttgaatggtctttttctaggaataggacgtctcgttcaacaatacaacacattaatcaaacttctgaatttatgtctattcaactgtacattttctagaattagctctgcctagatattgatatatgtagatgctccatgtagttgcggctgaatgtggtcgacttgccgaaggtcagtgcacttggcttactgaatagattggtcttccttggtttgatgaatgtattgcctactctgtgccagttgtgatctataatcaaatcatcgttggaattcctgccaccatggctcttggttgaaagaccggtcttgtccctgttgttctatcatccagaatgataactcgttatcaagagtcgatctgcatgccttggtggtttcctactactctatgatacgaaaatgttgagtttcaagccctcctacaccggaaatcactgctgactggaagatcatttcccccagggccgctcgtgaggtcgtcacctcggtcccacaaagattccgaataggcgcacggtacgggtacgggtacgggccgggcccgtcacaagcaaaaccaggcacatccagcaaccaatcaacaagacgtcgctagcattttacgttgcgtcaaaacagaaagacaaccactagactcagtctacatctccaacaatacccaatggccttgacactcgagttcggcagaaacttgcgacattagatcaagctaaggtacagacacttttcagatgacacttccacgcgagaccttagccgtgcagtgggactttgcaatcatatcaagtgatctttccaagacagtcaaaccgttggtgtggtgtattatagggtcaaggtacgtgtcgtgtctctttcgctgggattacttgaaatattccaaaagatactaaactatgtttacattagattctctatcgaaaaaccgaggatccttcagaccatcgccagctcttacagcaaatatgcggcaatttgtctcacccgccacggaacgaggtacaacctgtcggctcgcccttaatcgtttcaatcctctttagtagcggatcattcagatgaggagagtctgggagctttggaaggtttctacaaatgacgaatgatatttgctgcgagaataagaagagagcaaaaaacgattaacgattcaaatggacaagactcattctcaacactaaagatcgatcgctatctgcaactaatggagtgatttgtctactctatgggttggcgctcatccaaccaaggtgaccggggctcattgataaagacacggactgcaaagaagtcaatgtcgagtatcatccgactcatatatcacgagctttgtcctggatttgggtctagagcatgtttctcctacagtgactgacatattttgctacagatatttctatatttgcttccttgacaatttatatatagagccatgattatataaactaaaataaacattatattgaagaggaacatgcacgatgggcagccttgtcatgcaggcaagacgagaacgacacaacaacaccaagcatccagggcggtcagctagcaagcatagcgaccacatagatcacaccatagtatacgatctcctaatgcacaagcatctcgcaactttcttctcatttccggggtgatgaactgactagactacctgctctctgagactctacttagcaaccgggctctcgcttttctctgcttgaaggataaggccactaagtagggattccgattccctcactgcaatatattgttaggattaatggatcctccggtatgctccggtatactgatctgcatactccgataaaatctactggcctgagaaatcggaacatgaaaacaagtatatatgaacgcgttttaagactactggtcaacctcccggaggaccacatcatagtcggcaaggataataccaccgtgagcagcagcgttccgccgagaccttctggtattgctgataggcttctcagaccatttgtcgagcacaattgaccgcacctcaattgtatgtgcatcgaacgtccgctcatattttatgagggcttttgggcctcttcgaggtctttttgtgtgtcctcgagatctttttttatatctcggatgttctttccttgggtgtcggcccttttctggagatcttggacagcctgtgacggagtcttaagcgtttccagaagggtcgctcactgttcacccatgcttggtgattgtcgttaaacacgaccgggtctggtgacaatgcttatcgcattattgtaactgagtcttcgctcgtaagccttgtcagagtgtgattagcttggccctaggctaattagcgaatatgatactgttactaaaatgaagcgacttgcctcgggtggaaaagctcgctgcaatgcggggatgggatcgactgctgtactgtgcgagatggcggatgaaacgttggaaaatctcttgaattgcgtagagaggaaaaggaaactatccaggtgctgggactaaatagttgttgggagcggagaggtcacatgacctcgaacagatacaatcgggctgagaggatcacgggtagtggatttgtttattggggatttccgtcctttcttctgacatttcggcattttagctgatttctgactcagattgccattagccgtgtaatcaatgatgtgacgtgggtgtacgataaaaatagctttaagatgtgggtacgtctagttgatgtgagttcatcgtcaatagatgctcgataaaccacaactgactagaatatgattgaactaggtcccgagcgtgaggtaatgccaccgcttctctcgccaggcgaccgaagacaatcatctaagctcggttcgtccttacttcgccctcataccgccaggtctcttatatctaggcatataaaatcttcctccaccatatcgttagcattaactgacgtcgtttcgaccgctatacgaactgagatcaaacggctcgctggagattcataccaggtatgtcagtctacagaccctcagatctgccatatgatcggaaaagaagataagtaggtacgtggtactattactactggttcgaatggagtatagctaaccatatttagataggtaacctttggttaaccgcgagcctaatcgacttccaacttgatatcgggacttaagtaagatactgttggttagcatgcgataatagtaaattgcgttgatttagtgaaattaacagcatgaaaaatatcatgaatgaacataatctttatctaccagatccagtgtggttatatttactagtaggttttatccgaaatacaaaggtctgaagaaccccggtgcaatctcatacattgtttcattcgctcaaagcttagacttcttgccagtcacgttgggtacatcatccccggagagcaagaagtccggataagacaaactcccaccggaagcaccgcctgcagacatgcgccagtttgcaccatcgactgtttatgtgtcagttcgcaacattcataatgtccttttgttatttgacaactcaccgacaagtgtttgaccagtgacatagctaccagtgtctgaaaagagatacacggtggcatcagcaatgtcgcggacatgaccaaagcggccgagtggctgggccttggtgtaggcctccagggcatctgatggcagcagacgttccaagccctagtgaatggtaagtcaatcaatttttgacacagtaatggcactgttgagacttatactaacctcggtctgtgcaatagggcccggcgcaatgatgttcgacgtcattccccgaggaccatattcgatggcaacactgtgcgacaacgcatcgataccggccttggcaacggatacatgcgtctggaaaggcataccccgatagtgaatggtagcactgacgaagataattcttccgccagttccaatcggtgatggttgaactggggggttgtcagtgccaatggttaacatatggtgggattcactggacggtgccctcacgagtctttgtatccattctgtgcttggttgccgactcccttagatacggaagagttgccttgagggtattgtaagagcccaagacatcaatatccatgactgacttgaaagcattgaccgagagttgctcgatggaggcgaggaagttaccagcggctccagcactgtcagatactatcagtatgagaatcgaagacacggtcaagttaatatatcgacgtacatgacaaaatcaatgcctccaagttccttgacacaacgctcaactgctttctgcaaatcctcgaacttgcgcacgtccacggaaccgatcccaatcaccttggcaccgggtcggactgtcgcgatgtccttagcgacgcgctcggtcttctctacattgcggccaatgatgcaggcgttggcaccgaggtgtactaaggcccggacttgggcactgcagatagtgccggcgccacctgtgcagaagacgactttgtttgctgggtaagggagttagtgtgggttgtgcggtagcgatggattcggagagcctaccgaagatcccatccttccaggaatcactcaaatattccgtcttgggcagcggcattcttgttactatgtatgtccctggataaattagtttaaagattgtgggggagttgggggaatgttcaggaggtgatttggtgatacccgtttccccacagttacctcggcttcacagttttatgcataaaagattagtgatacaaaaatacaaagctctacaagaattgttgtttaaaccgaagcagttgacaccttgcttgatgaaatgtatgctgagaagacatatttagttcacattccgtgtacatatcttgtctgcctcatcctctagagattcaaggcgcttcatagacagaaatggcacatttccgtgcattgcattgttagtcagcagccacgtgccgtgatgatataagatttaagattcagcctccatctttcagcatcacactagttatggtatagagatgaagttgacgtagtggatgaataatgaacgtgacgattgattgcataattagtgagtactcccccgtcttcgatattcttcttatcacctcattgattatatactttgtcctctactgtccggctgcatccgagatacatgagcatggtataccctagcgaaccaattgtttcaccgttggttggctcaccatttatgcctgtaccacagcaaaataaacagttgtgataattaattgacagtatccagtatataatttatttcctatactagaaggagttccaagtggcagaggttagcttatgtaggagtagacgtcgatctacatctaatatacgactgcctagatagcctagatagaatcttatataaaaaaaagtaaacgctagacaagacttatatcttcactgctttttactgtaataacaacatatagattgccctcattgcgatgaagaacaaccgttctctgattggctgtcacgtaggcggaccgcgacgtcaccgaaaaagaaccacctcttatttgcattgttgacgtgaatcatcgactcgactcgactcatttcagattctgttatatttgccaaatacagctctgagccaagcaattgcctttgttttctgcagtatggcatgccccatcagcgttagcaagtttgttggcactgtctccctcggtcttcttaccgtacgtcaatttcatctatcgcatcataaatacgctctacaaagactaacaacatgtttcgaatctacagggcctctcttactccacatcagccatcacaatcccagctctgcagctccttccaacagcgacaaccgccgcccgctctctgaacgaagtgaagcgcctaacccgccgatatgccctccggctctccttcttgaccaatacctgcttctgtttcgcatggtgcctctcatctccacgccgccgacacccatatatgatttggctatgtgcattctctacaatcggggcccacggtgttgatttctggttccaccgtcacctcggcttcaaaaactgggtgtcggctgtgatccgcgatgtttcccacttctctctgatccgggactcaaatacaagcaaggatgaagaccttgttgtggttgaggccgaggacgacgtgaacggcgaaaccgttcagcgcgagatggaccgggagcgccggctcaaccaagcgcgcacttggttgtctggtattgcactttcgatcggcattgttggtctttggggtgacaagaggtgatttttcttctctttcttctggccacgatggtctttcctcatgatgaacactagttgtggttccatatctattttctaggaaacccctttcgttactgtttctttgatcacgtctaatctgttttacgcctgatacctttcgttccgcccctcttttctcttgcgtatcttttctgtacatcgatgggaaccgctaggaatggagtatcttctgaacttgaattcggcgtatctgagccatatctacagaatcgctaatccgaccacccaagctaaagcctatcatctctcatatgagcctcaacttgactaaaattcgtgggaagttcaaagggagggagaggctgatatggaaattgacattacaatttctttatacaacaatgtaaaatgcagatcggcataagtgaatgtcaagacaatcactccatatagacaaacaagtattacgatctcaagtagatggcgctagactcacatgcaaatcatccttatcctccctttcttaatagtacctaaatccctagataactaaatatttatagccatagtaggcaagtcgaaagtgaacgataaataacagtaatatttgactgtggggcacgcagataacatgtccagaaatataggagataggaagaagaaataagcacagaacataaagtgaacagagtgaaaccagagtgaaaccagagtgaaaccagagtgagggcatgatgagggtaaagtgagagtcaaaggagccgttctcacattaatatatacgttgtacttaggaggggtatattagggtcatattgttataggagcataatgcagcgagatagattatagctaaagagtactaatatcaactctaatttttctaattacgaactacgtatagctataaataccgtcttctccctttcttctttctcttctcttctctcttcctacaatcccctccgtctctgcaacatcttcgccaactggtgctatatactagtaccgtctgtgaactcatatccttcttacttaccactcgtactctactaacatacatgggtataaatagtcacttcttcccttctaccttccacctttcttcttccaccctccatcttccatcttccagtttttgccctccaacatgacgactgaacgtggcaaaccccagtttgtcaggtatctattaacctggatgtggagggtaagaaaaaggccctccaagactgcaaggaaaagctagcgaaggactcgaaagccagaaaccaggctcccacgggcaggcattcgacccccacccgcagcagctcgacaagggaaaagaacgtggcccgagatcgctcccccttgaggatcgcgaatgtgatgaccttagccccgatgtctatgattctactggtattccctctctccgtccgcgaatcgtccctcgatcgattcgctggggaccgtgacacgctaacttccgctcgcgccgggacgatactagatcattgacgagtcaaaaaccatcacgggctaggtcacacatggatacggccacgggacaagagcttgctgggacgttgcaggcagaggtgtgcgacaaaatagtagcggtgcaagaagcatcagctactacccccactatcgctccccagcaagtggagatcaatgaccttagccccgacgttgatgattcccccagcattccttctatcccgaatcgtccctcgatcgattcgccgaggatggtcacgatacactagctcccgtgtgtgccgtgaggatgttatatcattggacagtcacaaatcatctacaaatatatttgatcactagttacatactccgtaattatgccatgtacccctattgtctgactagctatgattaatatcgattagcaagaatatccagggacctagaactaaatcagggcttaagagtcatagccagaccaatgatctgaagaaataaaattaatcccaatacgctaaggagaatggcggagtcgtcggaaatgagccccttggcgcaaaaagaataaaaaggacatggcagtgcagcttgtgttgctgtgaaatagaaaataaattcagatcaaatctataagcttgagaatcatgggcaacttcaccatcgtcaaaaggccaaatctacacgccaggcttggcaatcgtcgatgcgccacaacccaacacgcccctcggaggaggcaagtcaatccgccaaaaatctatcaactcctaactaatttcttagacaacctgcaagtcgcaatcgacgtgtccggcaatggccaattaccatggccggcatcaactcaacccgactcatcgacccacttccacaacatcacactctttttaacatccgagtcgcacaactttaccatctctaacggcacaaagcccgcgtctaacacaagctatatcggtcccattttggacctggagccctcatccacagtcaaacatgtgaattggatttggcccgaatgcctcgtgggagacggctctggctcaaaggactcggcgcgcggggcatacaatatctctatgcaccaatctttccgctggaatgggaccgattattatactctctttgacctgccgatctctgtcaccaacagtatacccaagagtgacgatcggatcgactgcgatctactggaaaacaagcttcttagcgcgacggagatcggcgagagctcggattcgctacctgggcagccgtggattgagggcagagttagcacgacagtatcgagccccgaggcgactcagacagggtcgggtaatcggtgtcattcgggattcaggagaatagctggcattgcgattgccgcgacggctattttacatttcttggtttgaggttcctggatatcatcgggttcatctctattaattatcaattttagcattgtttttgtctttatatcagtacagaaacaaccggcttacttccacgtgcgaccaactatagtgtagattcaaatatggctgtcacaattcgtctattaccgaccaccgaattctactccttctgttcatgatcgtcgtcggtatttctgctttcggaagtatacattctcatgttgattttggaccttggggatatcccttgattgcctagctctctctcccagcaaagtttaatatctccgatcaagggttccttccacatctctagtcaagtatgtcaagaagattagatcgcgcacaccggaattgacaccaacattgacaccaatcttctttccatgccgattttgtccgcctcccgacgagtcctccggtaccgcatcgcccgagccctgctcataatcttcgcaatatggaatcttgccgagatacatctgattcaacaccgaattcacgaagtagatcacgctatcccccgacaccggccgcaaaagcaagaacgaatatatattgcaagcatcaattggaacaatgagctcgtattacgcagtcactggatcaaggcactcacacagctggtcatgaggcttggtccggaaaatgtattcatcagcatctacgaaagcgggagctatgataacacgaaaggcgcgttgagagaactagattgggaactcgagcggatgcgggtaccacgaaatatcactttgtcgcctgtcacacatgaagatgaactagccgcaccggcgaggggtgagggctggattcacacttccaatgggaagaaacaactcagacgagtgccgtatctggcgcggacacggaacttaagcttgctgcctctgcgagatctcgcacgacagggtatcacatttgataaagttctgtttctgaatgatgttgtcttcacggttcgtttcaatcgtcctatcttctgtggaatgtttattctaatgaaagccctcttctgtgattagccgaacgacgttcttgaactcctatatactaataacggcgaatacggcgctgcttgctcgttggatttctctaagcctccgaattattatgacacatttgctctccgggatagcgagggccatgaacccatcatgcagacatggccctatttcagctctgcggtatcgcgacacgccgtgaaaaaattgtctcctgttcctgtaacgagttgttggaatggcatgggtgtgtggacctccactctaggagagttgcatgagctaacgtatatctagtggcaatgcccgcaagtccattcatcgacagcccaccacttcgtttccgaggcatccctgattcactggcgagctatcatcttgaaggctcggaatgctgtctcattcatacagacaacccactatcagtggaaatgggtgtttatttgaaccctttggtgagggttgggtatagcggtgccgcatatacagctatgcatccggtgatgaactggctctctgcgaaagcgattctacaagggttgtgggtcaatcgactgcgccgtttgggtgtcacttcatggctgaaagaagaagtagttcgaaggcggttgaacgcctggagagctttgagtactaggaatgaagaacgtggggagatttgcatcatcaatgagatgcaaattctgcatcgatacgggtgggcccatgtgtgaagtagagccagtggcacatcgcttgtatatatcatttagtctcatgctgccgtcctaggactatagccaggcgcttataatatgctttatatcttcacctcgcgtgaaatatatacttcgggaataaaaagaaaaaatacacagttttaagattaagttctgcagcagcttgatctacgatgcatatagatcggctactgatattcaatcgcactccatgaatatattgtacaccatcaggaaaatacgaacctcagcatccaatgcattcgactttagcctaatcttcaattcccgtcttttcccaattaattttttacacccccgaggccggcgcaaagcgagcgattatgtaaccccgagccgcctgggactgtatcaaaagcaaaaacccccacttaccctccataaaccacccaaagccccaataacacataatggcaacaatccaaatcctagacggaggccttgggacctccctaggcgatctatacaacatcaaattcgactcgacaacaaccccactctgggcctcacacctgctagtgagcgacccagcaacgctgcaagcatgccaacgcgacttcggcgttgccggagtagacgttcttctaacagccacctaccaagtctccactgaaggatttgcgcggaccaaaaccgcccaattcccagacgggattccgcgcagcgcagtagggcccttcctacagaaagccgtggacatcgccgagcaagcgaaggtgcgcgagaacgccagtgtcgcgctcagccttggcccttacggcgcgtgcatggtccccggccaggagtatagcggtgcctacgacgccgcgcatgactccgaggagtcgttgtatttgtggcacttggatcggctgcggatgtttgctgaggcagagggggagcttgtgtcgcgcgtgcggtatgttgcatttgagacattgccgcggcttgatgagattcgtgctgtgagaagggcgattcaggattctgctttcgatgtgccgttttggatttcttgtgttttcccgcgcgaggatgatctcttgccggatgggagttcggtggggcaggttgtgcgcgctgcgattgcgcctttggagggtggggctgttccttgggggattgggattaattgtactaagatgcataagctggctgggcttgttgatttgtttgggcgcgctgttgcggagtgtgttgcggacgggcaggtatctgatgtgccgagtttggttttgtatcctgatgggacgaatggggaggtgtacaatactacgacgcaggtttgggagagacctgatggattgcgtgatagtgtgagtgctgacgtgagtactactctcgggagtcgggtgggaagattgtggattatgctgacgtgaatttagcgatcttgggaggtgcagttggcccaggtggtcaatgaagcctacgaaaagggctatttcaattcgttccttgtgggtgggtgttgcaaagcttctcaccacgatatcaagaaacttggagagcaattcaagactcaatagggattatgatcacgttacgagtgaagtttggaatgaaagctgaatagaataagacattataaatcggtcatgttgaattgccggctctatatggggatatttatacattatacaagtcatttaaaagagccaatcggtaaacttcgtcaacgcattgcgattggggttttcaacatgcgtgatctccccatctacaagacggcccgaccataggtcgatactggcggcacgctcaaactacattcgacatgttagcaactcttcattaagaaatagaaagaataagagggctgaactaaccttggtgcgacgccagatcttccagcaaatgatggggaaaatgaagatagggataccgatgtacgacgcaataaagtccgacgtattccagttgcccttcaagaagacggggaaaccagcaaccaaagtgatgatgatggaaccgatgaagcccacccacgcggcataaggttgcaaaggtgcttgccatgggagtgtgtctcggctcacaccttgtttcttcatcgcagcaaagaaacggatatagcacaagcaaagggttgcccaagcaatcaaaccggcaatggtgctcaggttcaaaagccaggtgaaagcctgtgctgcaccaccggtgccgagactcaggtacgccagcggaccaaagagccaggcggcaaaaacggcatagtatggcacgccagacttgttcacgcgcgcgaagatctggggcagttgcttgtctgtagtcatggcgacaatcatgcgcgatccgacccagcagtatgagttaccggcggaccacgcggcgatgagaatgcatgcatttacgatagagggcagagccttgatgccggcgttagtgatggcaatgacgaagggcgagctgttcgcgtttccggtgccagagacaaggccttgtgctcttggatccacgatcataccgatgagaagtgctccgagaatgtagaagatgccaatgcggtaagtgacacggcgggcggccttggggatggcacggtggggatcaaccgattcggatgcggtaatgacgacagtctcgacgccaatgaagctgaacgaggcgttgaccaacgaagacaggaagcccaggaagtgacctgtcggaccggtgataccgttgtagtctgtccacggtccagggtgatgccagtagcggaatccaatggcgccgcctttgggagcaccacctgcagtaatgacaatggagacaacaaccaagccaaggaaacagaggaccttgacggcacctccgaagacttcggtttcaccatagaatcgcacactcatcaaattgatagccaaaatgagtaccaatccaactgtgatcaccacggcaggcgtgagatccgtccaatatgagacaataaccgcggccgcggagacttctgaggcgatggcgatcgtgtaacagtatccgtatgaaatagcgagggagaaaccaacagccgggtcgatgaatcgagtcgcccagtgagggaaggatccagcagtcgggaaaagcgttgcgagttcggctatactttgcatcacacaccacaagactcctcccacaataatataggcgagcagcaaaccagccgggccagctttggcgtaggccgcaccagttcccacgaataaacctgtgccgataccaccgcagaaaccaatcatggtaacctggtaattgcgcaggcgtcgctgcaggggcgcacgaccaccgacattgagctcaaactcggccttgggattgacatcgtagtcttcaaaatctgcgccgggcgccgactggacgttctcgttgtcgtagccggacttctccatgttgtgtgtagtgccgatcatctaggctaggtctgccttagtagatcttaccccggagacctgaggagtgaccgaaatgcttagatgggagacagcttttttttttccgacttattattcagtctcggtccaagcacgacatcgggacttctattgacgccaaattgttctccacagtggggagactcattggactgcgtcgctcggagttcggcctctccccacttttttaagcggttgactaactttttcttcattttgccataatcgcaattgaaggcaaatcatggctttgatttgttagtctgatatcgcaaagcttggtggcataggccggcatcgtgggagcattgtggcgagtgaatcaggtatttttgcccccaaggtcccgtgaaaaatggatgcatctggaaaccacgtgctctgccggatagatccccgagaatgtaagctttgcgcctgagatatgaggcaaccttgttattcagccttagtcaccaacatcttcaaccttccaggaaccttccaggaaccttccaaggttggaattggacccttttcgtgggacaaacaatactacggatctcggtgttaggcctgaattacggagtaactgattccgatttccgaggccacgtagccgttcttctcctcgacgccctgcctttttctgatcatccgatttgcgtttaccggtataagtgctattggctcattgagaatcgatcgccggtttttgggggcatttgtatgagacttctttgaagaaaccttataaatttcgatccgccggactagaagtgagcttgcatctgtactttgacgaatatgcctttgtacgcgtatagataaagtatctagctcagccagatcattaagaagcttatcattaagcttcttcttaacccgtatgtatgtagtatccggtagcaaattttgattggtgcataaagaacgagctagctatattggaactagtgcattacctggtcacatgacacatatctaagaccttaggatttaatattgcttcgtttcgctccataatgcaagcaaatgcaaataatgaaaatactttcaaagtctaaaagattttatttagttatgtcagttcgacaggaacatgtacaattatttatgcatcaaatatttatgcacaccagggttccccggatattttaccctaaaacaatatcacatgaccctgaaaaggtcgataccacacaagacctcaacttgttggatgagattcgagatcagttttggcgtttgagttaaagtgttacatatgtaaatatcgaaggctagatccattatcaaaccaccaggtttctgtcaggttacaataatatctcgagaaatcttcgtgcaacatatggtgcaatgaatgggtcggtacggagtagggggcaattaaatagcggatcctctacggagtactccgtactacattttgggttttttggcctcgcctctattcaccctattttgtactccgtacggaggatccccttaggttcgttcggcatagtgatgtcgtatgttcgagaatatatggtatggtttgagatgcgaggggaaaaccagcaatgacacttccactcgtcactgtgtcgtatggtcaactttttcagggcccattgccggatcaaccgtgcgataggagtctaagaaattatcgtatggtccactgacagcagcgatatgcaaaggcgaagcgactccgccgaggggtatccttagactagcaccgaccgttaaccactatatcttacagctgcatcctcacaaatcagacattgcaacttctcatccgcaattgagaaccaaatcttcgctaagcccgaccgaatccccgtcctggtctatggcatctgacccgaccaggttaaagcctacctcacaaactctcactttcagtctctccccgtggcggaaagactagccatcgccgaggccgtctctctctggaagggactagagtccggcgattcatacatccccccgcccccaagcgtatctcgagtccgatccctggaattcccaagcaccgcgatagcctcctctgtaccgtcgcgtctaccgatggtgtcgcccgaagcggccagaaagttgccggtctaactagccacgggatacgtactaacatcgtccgcgcgcagcaagaccgactcccgaataaaattctccaggcatatatagacgagggcatccagcgctagacaaggagactggcttgaagtggctgtatgacgggctaactcaaaagtcgagtttgtacaagccatttctacgagacatttcgataattaatgattgaccagtatgctgtccatggactgagcgaccaccgcgaaaattcatggaccgcagctaatgggataaaatagctgcatgatatatgccccacactagaatcatttcctggggttgtagtttacccacggcgagaaacttccatgagccatcatcccagcagaaactatctgagcaactagtctataacttataggaaatgagatcgtcaacgtaactcaactgacctaacaggaaaacaagaattagcaccagcaaagcaaagacaacaagcaaagtgtaagcagatagttcacggctgggtaaggataattctcttacctggtccaattacgatttgttgacaaagtctagtcttccatgaacatgtaaagtccaatctgttggttgattgatgggtagcgctataatataattaccaacgactgtgcttccttataagtatggctggactcttactcaatcctttggcattatctaagtagctttgcagttcaatgagccgtgaatctagctctggtgtccctatgaagatcgctccgcaacttggaagtatgatgctgcgaaggtccgtagtaggggtttcttgtgctgagtcggcataaagcaggacctaattatggtgaatgataactctcttatgtagaatggtgaaacttacgctgctaactatagttcccccgagactatgtgcaataaatataatcggacaattggctgtccgcgttgaacaagacttcatcgtcctcacaggagaagtcgtcacatatttcgatccaagcggagcatagtgatgatcaaggctgatatcattggtgcaacctgggtactcttattagtctcccactcaataatagggctgcatgtccgacctcctttcctctcctgcattacgcatgcctaattcggcagaggcgttcgatagcgccagacgaacctaatattaaacactccatagtcacactcttaatgttaatcggcctatggactgaaacaagctgcctatgccaagacttccatttcgtccggatcgcggacgtccgcgcccacacactgccaagcgccaagtttccatcataattcccagcataagagctaatgcaggattcaatgccgatccacgtcggccatcacatgggagaatctcaatgttaagcttggaaacagtttattattaaacattccgatcaataacgccgatcattcgttgtcttccgtcttgggacggggtaaaattctattcagctgtcccctcattctctcccctttcattgcaaggaatgcccaattactatatctatcccttgacaattttaccttcattctcccaataatcttatctgcttgcatgttcatggaatgactgatatcgaactctcccagcgagatgccctggaggacgagtccccgctcacctccaacggtgaggggtcttctgcgcccgtgaagccagcgcaggctccaaaggccggcaggaagctgccaggatggctggatcacttcaatgcccgcgatatgaaggtgctgttccgttgcacgttggctgcatgggtcgcgtcgcttttgatcgtgatcactccgtccttaagcgtcattggtactgcgactttctttgcaacgtgagcgcatctatattttactctcggtatcaattgctaatcctatcgcgatcagtctagtactctttatggtgcctccgaccggcattgttttcattttccttttaggaactctgaccgttatcattggtatggctttgggctgggcctggggtgtcatcactatgaaggctgcgatggcagcgagaccagcagccgagacccaggccaaccttcaatccctaggacaggccgcatacagccaggccaattccaccggacaggccgtggcagaagtccagaaggagcttatctataacggctggatgcttgacgctcgtgtaacagttgtctactattgcctaatctgtctgttcatctatttaatcgtgagagacttcttgacccgtgcataatgatcgcgacactgaccctttcgcgcagtcccgtcttcgggctaagaaccccaaactcattctgttacagattctcggaatcatcatcatcgatgttactctgactattggcccgatgcttccatatttcagcggtactgtccctaaggtcttgatcgagcctgccgctattggaattgggttgggcctggtctcccattttatcttcttccctcgatctacctcccacgtcgtgcttgatggcatggaggggctggtgcggttactcaaagggcctgtggacgtcacggagaacactcttctgaaaggccaagtcttggatatggcagatcttcaaagaatcaaagggcaaaccattgctgcttacaggaatctcaagccggccatggcctttctgccgttggacttctctgtcggttggtggggtgctgacgacatcaaaagcatgaagaaaccaattcgccaggctttggtgagtagtctgtctcttcttgaagttcacatcgcccgcatcggcggagaagccaagttcaaaaagctgcaccagctcaccgtggatcgagactccgactctgattcccaagcgaatggaaatgagaaaaaacgcccacgcgaggttggcatgcgccaaatgatggagggtgttaatttggtacaagcaatgcgaagcccggaacatgaatctatgctatcggaaactgtcgaggtattgcgcaagtccagcaaggatatcctcccggcgtgtcaggaagctgttgagatcattgcagaatccattaacacggccaacaagcgttggttcggtcgcccttccaaagaacgtctcaatcagttgcacgagcgcagtcagactgtacttcagaatcttcaggccctgcgcacatcgttcgcgtcggaaaccaccgaccgtctgattcaaacacatgcggagattttcgatgaaaaaggcatgctcaaggcccttgacaaaacttcaatgcccagagttaggggtatcatgatggggatggtcttcgaagagcaggtgctcggcgtcgctgacgggtgggagcgggtcctgcgacaacttgtcgtcctcctaaaggaacgtcagaagatccgtctgtggctacccaagggcttgcgatacgcactcaactgggtatgtcgtaaaaatgccgtggcgcctatacccgcggctgatgacccaatcgtcgaccccgatgtcgcagagacgcagtccaaagcggcacagcttcatcttcgcatgagcagagggtatcgtgtccaccgaggtagcagctttgggcgcgctatcatcggcacatatcattggtttatcaaccctgaaggtctttatgcaatgcgcatggtggctgtcaccatcgcgctcgctatccctgctgcgattccccacactgcgggtttctattaccgtgaaaaaggtatctgggctctcatcatggggcagaccacactggttatatacatggccgacttcaccttctcccttatttgtcgagccattggtactgttgttggtggtgtccttggcttagttgtgtggtacatcggctcaggtcacggcaaaggtaacccgtacggtcttgctgccatcatggctgttgcgctcaccattctcatgtgggcacgtatattcacgtcccctgctttccttcaagctacaatcatggctggtgcgacctacattctggttgtcggttacagtttcgaggatacgtaagtaaatggtaccacattggggaagcaacatggctgacaacttcacaggcacatcccaacttacggcaatcccggatggggatatagtgttttctggcgacgacttgtgcttgttcttattggctccgcagcggcactaatcgtgcagctcttccctcgtccgccatctgcgtcgagacacatctgcaagtctctttcaaatgtcatccgctcactgtcggaccactacgcgcttctcttatcctgctggggacaagggcgcgaagagggcctggccgcagagaagctagctctaaatcttgcagagactatcaccgcactggacggtcccatcgccttgctgcgctttgaattttcgagctcgccatttgacagcgatcgtctcggtcaggtcaaagcactttgtcaagaactcaaccagaacattgctcgcctactttacctatctgcttcgctgccggagcacctacagactcgcctcgctcggcaagtcggtctccttgatcatcacaatatcggcgacatcatggctgttctcggtgtggttgaacaatcactcaagacgggtgaccccctacccgagatgctgccaacgccactgctcaaccgttgccacgattactggaagtcgcaccagacagatattatcctgagcaaggagttgatccgcgacgagaactaccgccgattctgcgttgccatcagcgcatacctcaagttcctggctgccgtggatgacctagtgctcgtgatgaagggcacattgggtgagtcgcacatcgtcagccgcgacctgctccacgaaccgaatgtataagagagcaaatttatattgtaattagagtgttctatcaggatcgttgacatatataattgtgcatatagcgatgtgtcatcaaaattggatcccctcacgttcctccgcacggccggttttctccaattttttcttcttcccctaattcccaacccattctacggcctttgctttgaatgaacgtcattcaatattttgtttttttcccttttgatctcctgtatggacgattaccaataattataatattcaattccatctgcgggtctcgtccatggcccctccacgtcttgcccgtcttccccggtggatcagccactggcttggctatcgcccagagcccgtgaagccactctctaaatacgaagtcgctctatggtcgttcataatctcattctgcggtctatcggtcttacaagcaattttcaactactccgactacttcaaagagcgcaatgtaccgggtatagtcgcatcctatgtacgtgtcaatagccaaatcgcattcccaaatatcgacattgactcacataaaaccagggtgcatccgccgtcctcgtcttcggcgcaattgaaagccccctagcgcaaccgcgcgctctagtcttcggccacttcttcagcgccctgaccggcctctgcgttaccaagttgtttagcctcatgccggacaaagcgcggttcgagtccctgcgctggctagccgcttcgctttcaacggctattgctattgtcgtcatgcagttgacgggtactacccacccgcctgctggcgcgactgctctgctcccagctaccaatgcggagatttggcggctttcttggtactacttgcctgtagtcctgttgtcctcgactatgctcttggtgtgcgcgttgctgttgaataatttgcatcgccggtatccggctttctggatcgcgcctacgccgccgaagccggctgcgcctgttgctccagtggcgccggcgctggcgcctgttgacgtttcgtcggaagaggagaagtcggtgaagagtcctgtatgatgctttaaagagcttctaatacactctggtaatggttgcacggcatatgccgctatctgtttcaaggatgcgagatatatatgatgtatataaaaactcggttgcactactaacatatccgagactacgtaaggaaaagaaattcaacatgactctttcagggtctaacatacctattaactgtattcacaatctcccaagagctactacgtagcaagcccctacctagggctcttcaatattcactcagtttacgactctcgttaggtctgattgcattaggggaagcagcttcgtctctctgtcttctatgtttgggtgcatttatccaattacttgcgtattgatttaggaaaaattttgagaggctactgtgtgggacaagggagagttgacaaggctgtgccaagggtttagctcttgaggtctcttccttactcttttcgtcttacttgattaacactacgtttctacaatttggacataatcaaggaacagctcatggttctatttgactcaactagaaatttaggcaccgcagaaaacagagaaagttgctacaaagcagagaagcaggcaggtatggacactgtcaaaacaaaacagaaatcccgcagaaataagcccccaggcttaatcctcctcgctgctggacgaagtcgtggacgaatagtattcctcctcaggcaaatctggaaggggaggagaaggggtaggttcctcggtaggcaggtagaaatcgcagcactgtcggcatgggcagtcatgcaccttgtagtacaatcgggcccaaatcattcgaagatagttgcgtctttcgtcatcttcttcgaaaagcttgagctcccatcgacgctgctcacgctcaaccatcttggcactctccactgcttcggtgtcctcatcgctcaatccatgcagagtgagacttccaacttgcatagacagcatgccgaacagcttcatgagcaccggatcctcgatggtggtcattagatcggcgttagtagaaagaataacccgtacgctgtcagatatctcttcaatcaagaccatgaggttattgcacctctcttcgaagcaattgccctccttctcggagccttcccgaatcaatgtccacatagacaatgtgtagaagattttgcggaggtaggtttggatttgagggacccatctgcctcctgtctgtccctcggaaagtttgttgagctccacgacgaagccatcgcggttttcctggaagttctcaatggcggcagctttgacgtcggcctgcattatgatgataacagttagagatgaggatgatgtaagctggagatgatagttattgaagatgatggtagtgaagatgcatacctcgagtcgtgggggaattccttttgtactcgagcaatagatcttgtctggcatagcagatttatcggagtacaaagagacaatgggccaagacatgacaatagatctatagagaccctcagccaaaggaataaagcctttggcttcgagatatgagtctcattcaaagcaggatgtgtcattcttttcctttataagcgcgaagaatagacttgaatatatgagccctatacaaaccagaaggggaactcaatcatgacagaattgcggtcgacgaatctatcaaatagaaaaagggggaaattatattagagaccgctgactgtgcatgatactcttagctttagagatatatagctgaagatagaaaaggtcttaggcaatcaatgaatgtaaaagttgtgctatattcaaggtatttatagggttgtagggttgtatgtgatcaaaggagtttgtgtgcgcccgtactctttctcccctttctttgtgcaccactcaaaatagcaatcaaagttgttttgcagacaaactaatatcaaactctcaaaggtccagatatcctgacaaagggcagtcaagtcgggtctttggggacgtttcaacaagaacgtgattgttcggcgcataacaagttcagatttctatgcaaaagaaggctggagttttccacaagctcggtcggctaatctctctttcatgagcacttcatagacatgcgatgcccacgcacagcaaaccttgcgcgtatccttcgggtcgatgatttcctctattccaaatgcgttcgctgttcgcaccgggttcatcagccgcaaatactcttcttccaactcttgataccgttcttccttctttccaaccttctcggcttcacgcagctcatgccgatggccaacttcaattccgccgtccaggggcagcgagccccactgtccagacggccaagcaacctgcataaccggatcacgacaacccaacataataccgcccgctacgccaaacacacgccgcgttaccacgttgaataccggcacggtggtactaaagtaagccttggcgagctcgacgccccaacgcatcgtggctgtgcgctcggcaaccgttccaatagcatagcccgcttcaagaaaacgcgtcagcttgtttcaaaggatgtaggatgaaacaaatcacttacggatgtccaaaaactgcagaataggcagattcatcacatcacacaacttcagcagccgcgttaacttctggctaccagcggcatccagtgcgcctccgttcacttcacagttgacggagataaccccaataggacgaccacctaggcgcgcaagtccaccaattgcagtacgcccccataatgcgccaatctcaaaccaggagtctttatcaactacagaggtgatgatcgaacgagcattatacatgcgtgcttgtcttcgagggatgatactccgcagtgcaacatcttcgcgctcctccaagtcagtgcagggaatagttggtggtgcatcgctcccactgttggggagatagctcagaacgacccgcagctgctcatagcactctgcctcattggcggcaaggttatcgatcgtgccgttcgtacaatgaaccataggcccgcccaggtcttggaactcgagaccttcttcgaatgtggcaccttcaacaaccttcgggcctgcattgaacaatgctccgatgtcggctgccatcactgaaaagtggcaggataccactcttgcagcgccaagcccaatctacaataaaagttagttcagctcatatcaacaaatgtcaaatggtatgtcagataaagcaaaagagaatatcacgaaactcaccgcaggtccaacaacagcccccaaattcggaatccccatattcaactgcttaataacatacggaaaagacgcaacatgagggagataactccacccttccttctgaataatcgtcacgctcccaccgccagaactcccatcaacaagcttaacaaccggcatacgcagcgcaatagcaagcttctctacataaaccgtctttccggtactcgcgccgtccgcatgtccagaccggatactgaaatcatcagccgtgaggaggaccttcctgccgcgaagcagtccagccccttggatgttattactaggcacgaaggagacaggcttctcgcgcatcggcgcggtcttttgccacgtcaccgtgccggaaacggacccgatttcttggaaggtgtttgggtcaaggagttgctcgatgcgctcgcgcacccatagcttgcctgcttgcttttggcgcacgtagcctcggttggtggggtctggctttgcggctattgcgcggagggctgcgagttgacctaggacatctgagtggtctgctgggaggtgggtttctgtggactttggttttggcttggactttcttggttgttctggtggggatatatgggatgagacctgttgtaggcggtccgtggcttggtctttgccagttctcgttgatgggctgtcgttgtcttttgtcatagtgtgtcgattgatacaggatgttgtttttattattattattgtgtagaatcggatacatctcttgtttaaggatttggtctactgaggggctaggcagaccttccgagggccgaggtcacccacgagagctataatatcttctcgaaggaagtacctggtaatgagatattttaagatacttcgattgatctatttgacctatttgaaacatattataactgatttcgttatttgatttacttgggagggacttttgcatacaattaccccggatttccccttccaccccgatgtcatccccgcactcacggcccatcaagagattgttggtcgccaacaggtatgaacttctaaaaaaagttaatgttatattatactcatgtaatatataatagaggagagatcgccgttcgtattctccatgcagcacgagagttaccctcgtcagtcgagacattcgctctctacacatcagacgaccgaccgcattgcgatctaggacgaccacagcatgcaattgaaatcccatcagcatcatcatatctcgacatttcattattggtcgacctggtccaaaaaaactctattgatgccgtgcatcccgggtatggattcctcagcgagagcgccgaattcgcgcatcgcatgtggcacgaagccggggctctcgtcataggacctggatgggaaaacgtcgcccggacgggtgataagctgcaggcaaaacagctagcacagcaatgcggtgtccctgtattagaagccatgagtcaacctaccaccaacgtggacgaagcacgtgcgtttgctacgcaggttggtttcccggttatgatcaaggctgttgatggaggaggcggccgcgggattcggctcgttcgcgaggagcatgagctggataatagtattcagagagcgattggcgagtcgccgtctcggactgtctttgttgagaaagctgctgtggacgggtttcatcatattgaaattcagattattggtgatgggacaggccaggtgcgacatttgtgggaaagagattgcagtgctcagcggcggtttcagaaggtggttgaatgcgccccggctttgatgcgggatagagctttggtcggtcgagtgatcgagtctgcgctcaggatggcaagtgaaatccgctatcaatcattaggaacctttgagttcctggtcagtgaacaacgcggggaattctactttttggaggtgaacccgcgtctgcaagtcgagcacaccattacggaatctatcagtgggatagacctggtgcagacgcagcttcttctcgcccagggatacactttacgtgatctgggcctcggcgctgaaattgacccaagtcatcttccgccaaatgccttttcaatccaacttagactgtgtgctgaagacccgagcaacgggttttctctgagcattggcaaagtgactaggtttaccgtgcctagtggcaatggaatccgggtagatacacatgtcaatgtctctgggcccgcactagttgtgggatccaacttcgacaatctgttagccaagataatcgtgactgcgcccacctgggaagcgtccgttagaaaagcccagcgagtcttggctgattcaagggttgacggtctgaagactaatatcagccttctacgagggatcgtggcccattccgatttcatggccggcaaagtcgacacgcaatggcttggactcaacatcgacgcagtactccagcaaggggagatgatatcgaagactattcagggactagatggttcagccggcccttcacagcaagtcagccagaatggactaccagtatctaatcttttgttccgaaaaggagatgcatggtcaatcacgttggaacctctgtcgaaggattcccaatcagacaaagtttcccaccatctgcgcctgtcccgggtactacgcaatgagttcccgactgcattggctgccgaaattgaatatacgactccaacttcggagggcgcaatcccctatcggatgcagctcgaaacaaccacgactgctgcgtcagcattggtgtcctcgtctcatcggcgaggtgatccaaagaatccccatcatattatacttcctctgtcaggcaaattgattgagatcctggtgtcggatggacaggatgtggttgaaaaccaggtcctagctttcgtcaagcagatgaagatggagctcgaagtacgaagccctcgaagtggtcgggtcaaatgggttcatgagatggaagacgaagaggaggatgttgccgagggcatgcttttggtcgagttggagccgaacaatggcaaagtggaagtccggggcaagttgtgattgtaggatataggatagcatctactgagtccctatacagatcaaattcgcgagtcctggttataaccaacgaatcagcttgcagatccacttggttcctcagcatcattggtctagtggtagaattcgtcgttgccatcgacgaggcccgtgttcgattcacggatgatgcacaagaatttatttttgctttttggctctggaatcggttactgaactcaataaagtatgatcgctttttggacgatgataagatgagtttggtatttactttttgcaaatcaaggcaggcggtcaatatgagcggtcacttccccaggtgacgtcaccgcctcggtcttcccatcctcttcctcttcctcttgtctctggcttgacccagggtgtttttcagtatggatgatcttaatctctatgtgctgacatttaactgtgcaagaaacattgtcgatgtcgacgtgttcgcggaccactttttcgacgcactccccgcgtctggtgcggggagctccgcacccgacctgattttcctctcgctacaagagatcgcacccattgcctactcgtttctcggaggatcctacctttcaccctacttcgatggattccgccgtgccgtccagaaagcctcggcacaaaaatggagccaccactatgtgaacttccttacggaaaatacgggaatgacaggcctgatgcttttcgcgcgcgaggacaccctggccaagatcgcctggagtgacaccgcccacgtcggcttcggggttcaggaaatgggaaacaagggtgctgttggggcacgcctgggatatgttgtcgaaggactcccatccaagaccgtggacctcactttcgtggcagcccatctcgcccccatggaggacttatatgagcaaaggaacatggattggaaaagcatagttgagcgccttgtgttcacgcacgacaccaagagaccggcagagggttcaactgcgaatgaaaataccggccttctcgacgacgctgcaacggcccacgcggagggcagtcgcagggatctcttcgcgcccaacgcctacctattccttgccggagatctcaactaccgcacgtcgaatgtcggaccctcaattcgagagatcgaacatttccctcggcgcaatgtcgacattgataacccgtcgcactattcgcaccttctgaagaacgaccagctcgtgcgcgagatgagctacggcaggaccttccacagcctgtccgaagcgcctatccacttccctcccacgtacaaatactcggacgccgcgcgcgaagctgtccgccggggcttggacaccgacgagcttgaatggaactggtcgactcaccgctggcctagctggtgcgatcgagtcctttaccttgataagccctcgtgggttggtgaggccggaaaggtcaaaccgctcgcttacaacgcactgcctctcttcgcacagtcggatcatcgtcccgtggcgctcgttgtatcggtgccgctactgccctctaacgaatcctcggacaccgagaacatccgagctgtggctccattctctattgatccgagttggaaatccaagcgagacgcggcgcgacgaaaggagattgcggtgggtgcagttgcgtatctgggactaaccagggaaggaaatgggctgctgctcgcgtcgttgctcggtgtcatcggagcgtggttcatccttcgatctatgctggaggtttgagtgacggtatggtgaacggcgctttctcgggactctatttttcctttcttttttcccctctcttaggtattttcatacgaatatcatgcaatgctgcccatcgcccgaaccggcgctggatgaaaagccatgtccctttcgctccgcatagtctccatagttccaaggtttgtaatccgggtgtattccgaggtcgtcagcagcctcaattggatgtctcgtgacgggaaaaacaccccgcattcctcgaatcgatcccatcaagtccgtcagataaactcaagggcccagctcaccggccgcagtcccaattatgtaccatcagacaaggcggcccgtcggtgatttcttagcaacaacctaaactaggaaattactcttttgggcccaagtcacatgaaccgagccgacccgaaacggtcgggatgcgttctgcaagtgtgaaagatggcgctaaggactgaggggcaccgtggcttggattctagacaagcggatgaggtcatgttggggttggtatactccgattatcgctcgtccatttcttgcttatgcgcgaggttcccatgatttggatgggctgggattgtaccctgcaggtactgcatagcctctctcttcgatgtctctggggtctttgtctccctctctcggatactgccgtggctgtcattagtaaggtttccactcttgacctaactctgtaggcacttgggcacctccgtcttccacattgtcacaccggggacttcttttttttttctttgggctgtgtggtctagatgcggagggagtcgtctactgcttttactccaaatgttgccatgtatgttcctcaactgcggaccactattctttgacggtccgcgacatccgggctgcagttgtcctgaaaatactactggctgttatgtaccgggctcttctatacatcccacgtcgtaaaccggtagtagtaaccccgaccattaagaaacgtgcgataacgcatggaacaggccacatgatcgggtcaagtgacccagtgagcttaatttcctgcttctccaaccccaaggctttcaccgcgtgtacaacttacgaaagcccttcaggcatgagaggcggtgtgtccacaacgtgtatagagatcaagacccccggacttctggaatgcaccgcactggatgtgatagcaagccctgcatttggggcggaaatcatctcattttcttacattggagtgtgtctctgggcacaaaaaaaaaaaagaaaagaaaagaaaaagatgggaagaaaaagacggaaagaaaatccccgcccggactccacagcctccacagggatgaaagggagaaaccatacaaatatactccgtccgacccaagtcaaagggctattgaattggattgttatagtgagattcaaagactggaatgtcggccggtcattggcgtgtactgaaatatgagataacgatcatccttagagtacctcccgtactccgtagttgaataggggttggatatactccagtgccaataaacgcaaacagaaattgggcagcaaaaaaaaaaaaaaaaacatgtcattgacagggcagatcaggagaaagtggacagcacagaaggatcggaatgttccatgcaaacttacaaacaggcctgaaggggataaccgaccaaatcccctgagttcggtggagattttcttttccagaacaaaaccagaacgacggcggagtccatagggagagggcccaagagcctaagacccagcattgggaatcggagggggcatcaatttgaaacggcgtctatactgaagacacaactagaagcaatcaaaagaaagtcaaaacgtaatctcccagtacaacatacaacatatatacctcgacggagtacgtacgtcgatacatattaagttccttcatctgttctgaagcttaaaggtttgtttgcattaggctgttgtttcaaaaatctgccctgtcaggtgctccacctgtccctgcaatatacatatgagactgcgagtcatcccgcgattttctgatgcatcgtatcgtcattttgtttttcgatgtatggtggatccttcattggcccccttcatgcaccgaagaccagcattgagccgatcaacccgcatgctcagatcaagggatcaggatcgaccgatctctgcattttagaatctattaaatatgtagcaggtgggataggcctctcacacgccggccctgcggaatggcaggggatcgaatgccacctagggcttggtaatcaaagacggagatgggttagagagagattaacggaataatataaaagggaataatataaaacagtcaatacacgacgtacaaataataaaagacaatatttagaaagaaataataaaataaaaacataaaaaataaaaaacccaaccccagtaaacgaaaatgggaaccctaaaaattctaatccttccttatttaactgcctggaacttggatttgttgcattgttttacttctaagccatctttttgagcctctaatataaagtcatcttctcgatcctctctgtcttcaaatctggtcttctcctctgattgtggctgaatctctatccaacgcaaccttgaaccgccgacgtcatcgtgttgtactacacattctaggccttggtccttattctccgttacatttaatcagtgaccaagacactttttctcttctgtccaaactctcgaagcatccaactcaacgtccttggtcgatcccacattcgatcccaacaaccccggtccaatatcatcaaccatgtactcttgcgcaaactatccccgcgggtgccgaggccgtgtcaaccgacaaggagcaaagtgctctgactgcgtggtatgtgccaaatgatatctgtgtctggtctatgcaaagatcaacgaaagacaaaggaaaacaatccaaactaaccctataccagtctctaaacttgcgccgtccagcttcgccgttcgcccaaccacgcgagtacaagcgcgcacttccctcggaactctttggcgagctctctaaactctccgagcccaagctgcaatgaatgcgaagctcatacatccgggacggtccgaagaacgcctcagcttctagctaggttgcatatcctgccggctgggatgcaccgcgcatgttcgacggccgcttcctttgttctttcttatttgctctccacgtctctcatctgcatcgccgggagtttctttgttatattcggccgtctgcctctactttgatgcctaattgcccggttttctctttgatctcgtctggactctccccacattggctgggctaatgagtgagctctcacgaatatctcctggaaactggagaaccgggcgtggacttcgcgaagatttccactttcactcgcttgggtttgtttcgaggacaaagaacggcccacttttcttttttttttttttgcatggaggatagatcgcttcattttgtttttgcatggatacctacggatatggatctgccactggagggcagtggcgctgatggattgggttctttcaactctccggttgatcgttgatcgctcccttcttttccttgcgcatacgtgtgctttctgctttttatgcccgattttttatgttcttttaactgatgttgactcttttctttgtaaacggtgatgccatacccctctgttttactgctttcatatgaccattcccctagtgctatatacctatttacagcattcatactattatgtcttgacatctatctcttctcgaatatctctctaaacaaatgtacattgtagactcgggcctgaccgcaagattacgtctgtcaacccaacacttgacacccaatcctgacaacgtatcaggtctacatgtacattaccctgagccgcagttccggggctatcaagttctgggcccaaacccaagcctctctctctaacctgtcgcggggacccgacatccggatgatcctcttccctgacatttctcagccgcaacgaatcctccgtctcacatagaaaaccaacatagcccaaaagaaaatccatccaagtctagaatctcgctcctgcactcatcccgtccaactctcggctcaccaactcacacgggaagcgtccttcatcagcccatccattcccctcgtgtcccatcacatcatccccccgaatccgctgcgcaatcccgagtccaacccttgtagcagttacaagatccccgtcacgatctagacctcgctggcccgaatctacagatctgcgcaaagagatgcgcgggtggcatgttttgttcccctcgcccggccagtggccaggggctatgttgcacgcgagattgcgggatacgggatacgggttacgggttacgggttacgggttgcggttacggggttaggcaataatggcatttgtgcgaggctccgtacgacctgcgccgtcgatcgttcgggttgctgtcgatggctcatgtcatgcaggggctagctatccctgtccctgtctgtctatggtgggcgcacacatacctctaacgcaccagctcttgcgggtggtatgtatctgactgacgccgttgcggcccgcggctttggtgatatgactaagttctacactcggccgtaactattggtctggtttttggctttttggcttttttttaccggcgcaggttgtgaaggtcatgtggtgtcccacggggtgcatctagacttagctgggccctggctggcctttttctcggaaaatccgtggtcccgaggggatcgttggctatgatatgtgatatcctatgcttttttttgcgggaaacgtgtcataccttgcagaatccgctcgaggacgggggaaaagggggccgcctactccgtaccgcagaacacagtacggagtacaataggagaatgcagaaaaagagaaccatgtcgatcgcttgtctcagagatggatagtttcccgctctatgtgttttgtccacaaatgaaactattgtctgtacgtgagattattgtgagctagacaatcccccctcgggccaaccacatatccaaatgggcaggagatcaggggtggccaagaaaaagaacaactcaaaaagaagaacgggaaaaaaaagagaaacaccaaatatccactttggtcggattatctgggctccatctgaatgtaaaacaaagcccagtgggatgcactagctacccagcctagtgttagatgtgcttctagccccttctactggccttctacgccgtttctctttttgggctctagcgtcgaaatttcaagccccctttttctctcgcggttttgacttggtattggccgtaattttcctgcgctcagccacattccacagtccacagtagcggatcgatcgctgtttcaggaactgtggggaatttggcacgttccaattccgcgggatgcgttgctcttgagaacgatcccctagctcgtttggaatttcctaagatctgttgatcgctgggggagggataatcggtgtggcgttgcgtttcccgttgacacttgggtaaattctgcatcggcattcgttgatatcgtccctgagacaagggtctcgtcgctgggcactatatttacagatctggcatattatgtctcattcctcaaacttactagaagtaagcacctacctagaagagaagaaaatcctaaaatattacctccgcgaattgcctagattaacactatattaactctcgtctccctaatatcccgacacaatgacaacgtgttgggcagctgccatgtagccaatccgtgtcaagctcagaaaatagattgcctctcgaaaagtctagaaaaaaacaggattcccgtggaaagcaaatcaatgactcgcgagcttgtctatatccaacaatcaagccactgtggatttcgtccatagatgggtgttgttgcatgtggcaatatccactgtgccctaagcgttttcgaagaccctcttattcgacacagaagtgtcaaaccgtcaaaacaggccgtcgtggagtgcccgatcggatctacaaacatatattgcctctcggcatctggctgccaattggttattagttccggtctggaattccccttcgggattggagtgataagcacggaacggctgggacggcaagttacggctgtctttacagtgaacgcgaccgcctagctcaccgccgggttttcatcggcctttatgaattttgaaatgagatctagttttgacgttacttttatatgaactagatcgaaagcagacaagtcgtcgtatagtgtgaataaagaggcaaaggggcaaaggtcaaaggggcagactataggaaatcaagtatataagcaataggaattcgattattgcggattaaactacggagtacatattccgtgtagttatacatatgaactgtatgtgtataactcagatttgtgtaagtgtatataaatactgcgggcaaaatggttaccggcggtaaaatctgccgtacggcaagtgtttggtccttgagagccgctttggggcgtaaatcccttaatttccgttcaaggtctggcgctttacgcggataccggcaccttgcggaagaatttgcgatcaatatattaattttgccgacagagacaatcaatatattggttcttacggagtagttatgttgtgcttgacattttatatcttaggctttcttagtggatcattgttcggggctctcggggggtggaggttaaggtctaagggggcctcgattcaattcatgctccaatagtccgtacggcattttatatgtttccaagtgtaatcatctacacgttcaaaatttgcccgcacacccactgtgcggtcttcgtgtggagtgtccaatctcgttcgtcctccagagtttcggtatcgcttgctttgttgccatatcctgcgtgacaggcctttccaagtgcttcgaaaacaacaacttggtctctcatatgtttatctaaacaggctcttctgacggtggaatcaggtttcttgtctgcattggcatttggactctcgtttgagatttcctcaatgaatccttccacacatcggcggactaaatctgcagccccagaaaatgcagcctcggtttgagactcgtgcctatgatcatgagctggttgttgcttttgtttccccttgttcttgggcttgtgcaggcgatcgcctcctatattgccaagaatatcgtggcctattctgaaacctgaagaggtatgggccacaagaaggatgtatacgtggctgcggtgatttgtggcttccgatgtgtgtattttgataggaactggtgtatctttggatgatattttgctgagcatatcttcttcacatggaggcgtagagcttttggcaaatatagatggatccagctttctcgtttcacggcgaagcaggcgtcgagtgccttgttcgataaactgtcgaagagtgctccccgtgccttctgtgttgctgtttagggtgggttgatcaggtgctagcactgtgatatcaatttgcgtgactttgccgcgttcgtgatccatcaagttaattcgtgggaagctggatagaggctcgggtgacttcttgttttgattttcgtcatctttcaatcgagatccaagtggatgtatgagaaaagtgacctctcccaggtcaaccggccccgttgtccagccgcgcttatgaagaataacggacaggggaggaagtccgagtttggcgaaattgggcacaataacttgcgctgcatagtcatatgatggagagaaggtagcattggttccaccagttatgttcactttcacaaagggtgtcgccgcctgcgatccaacatgaagtagatacgggtagagtgcctggaagacgagaaagatggcaccggcagttgagagcttgatgtcgtattcagacttcacactgacttgtgacaagtccagaagcggaccacttttcgatctggttgactgtgggcagaagttcaaggactgggagccaacctcgcctcccgagacttcgctgccgctaatctcggccaacagcttcactgctgcggcatgagatctcttgagccccttctttccatctctatttccgcgaacatgatcaatgctgactggacgaccagtcaatgcagacagcccgatggcaatgcgaaccagctgcccgccgccttccagagtttggccgttcaggtgaacgtggcttaatttggacgaaatagatcgcgaggccgccatttcaggagattttatctttgacagggatacttcaaatccttgaaatccctcgaaattccgggcgaaaaccaattattatattaattttgaccagagtcaggtcgtgaggctgcgtcttggcgtgagtcacttcggggctgggtaatatttattggcgccacaggcgtttttagcgcttagcgaaggcttagctctagatagaatattggaagggaaatcgagactcacctggggaagaggttgttggtttgttgtaaaatggaggaaatggaggaagtgaaaatggaagtcgccatggagttcgcaccttccctactgtgatgtgatgcagtactttcctctcatgatttcgcatctcttcaatcttccctctccaaatttcctcttctctgaatacctttttctctcaatactggctgtagctatatactctgcagacattttgtaacatgttttcttctacatccaatacacgcaacctaagaaggtccatgtccacccgctcaatacgaaaaccgcgacgactagccccagaaatccctgatgcggctgtgcagcatgcagcagcagcagctgcagcttcgcgtgcaatgcgctctagtcaaggctcgtctcaggactcgaaaagctcatacgaacgactaggtggtccaggaaattttgccatccctcgaaggcgtcacggatcaagccttcggagcactgatgatggctcgtccgtcggccagggcgactttcctaaagctccaaatccccgtcagtccaaagaactgaccggcgtatctgctcgagcgcattgcttcgatgaccctgcggcccttcccccaatcacagaactcgacggacttgacggacgagacagctcagtcccctcttcatatcgccgattgcgcaaggccaagtcgatgttctcgaccagccagcgaacttcacagaccccatatggagtgcctacccttccttgcagtgatccccttgatcccgagcgcagtcctggattccagctgccacgaacaatgagacgatccatgtcttttcttcggggaagttatcaatccaatcaagtcgctccaacttctaagggtcatgatgcggctattcagcttgctcgtagccaatttgcccaggatcccgacgctggaggtgttcagactcgccggccatctttcttgctaagacgcaagaaagagcataggccatttcgaaagtcgttccgggccacaagtgaaagtggcgtcgataccgggcgttctcttaaatctcggtctttttccaattccatcaaaaacaaattcaaacgtgtgtttgggttttccaggctcgatcaacaacctggtagcccaaatgcgtccatggtaaccccggctagaaaaagcattgaaggattctccccaaacaaggtttcagccattggggatggcactgattccaactatttccggccaatgccccagtctcccagccaagagagtctctgcacttccaagtcgcgcgtcaccagttgggctgattcaaccacgccgaacacagttacaactcggaagctaggacatcgccaatctctctctttgattagagaggacggattgaatcagcaaataccacggacgcctacaatggatgatacggaaaatcaatctcctctagctgcgagagcaaaccctcatcgaattagcattgttgacagtcaagatttgtacactgcgttgatgaaacaaatgggccagaattccctgcctaattccaatgaggatatggtcttcggcaatgtgtcgcagcatcgtgtgatcccagagcgggtgaattcggtctactcccaacatggccgacgcagtatccgtcatgtcccaagccaagaatcctcgacctcgcccggttcattcgcaaccgcgcgtggtggtgatcaatccagtccacgaaagtatcctcgctcagttaggtcgatgcaagtttctcggggcatgccgtctcagatgaaagatcaacatatgactgctgtttcggacgcaaagtctccgcaatcagcgtacgctttttgcgaggaatcggatgatgataatggtagcgttattgtttctcggcttcgggcctcgacaagggatattgtttccccaagtgtctattcccggaccaccagtggtaataccccaacaagaactgacaataccgacatcggcgttcatgatgaaccaggaacggcgaccatctttacttcacagcggacaacatacagctcacccaagcgtaccaatcgggcttcatcttccacacctaatgtaaagcccagtgccgactggcagcaatggatgagctcgcagattgaaagaattgagcaggcaagccccacaagggagcatgtcagagaatgtgcacaataccaggacgatgatgagtactttaccagcatagctcgacgagctccagtcgctgtctccgctcccggctcagcaactgtactcagggttccagactgccaaagtatcaccgagcgtaaagcttcagctgagaacagaatcctgtcacaaagcaatttctcccgtccattaacccaggcttccagcatgcgaaccatcatgccattgcagacaactaagtcagagaatatggtgcagtcttacgctaactcggtatccttggataccgctgctaagtccggtgaaaatgattcacccaagtcgatccctgttgcctgcaatcaacaaccgtcgccaattcgactaagatctggaaacatgcagccaccagagtccccaactcccaaaggtgtgggagcaaaacgatccttgaccaaggagcaacagcgacgctattcatctaggcgtgctccgatctcccaggataacaggatcaatcacttccggtccattcgtactcaacgagacaaccgtgtaaacaatgagaacgcgaggcaacaggatgagtacaatgacatgatggaaagctaccaccaacttcaagacattcattccacgatctctagcaagcgcatggtggatatgttcttggacagtcgccgtcgacaaatgggtgaagtcaccgacaacgatacaaccacagaggcttttctttgaacgtgggggactggctcttctgttattggaatacctcgggcgttgttcaatttttgatctgtcatattctttcgaggactctaatcattcattccctcattcattcaaccatcactttgggacatgtatactaaagctccgcgggtcggagttgtggaagcgtggaagcagccattgttatctttcattattttcttgaattaaaaaatatcctacccaattcattcgatattcacctggttgaaatgaataacagggtgattctcaaaagaaacaaaaaaaaagaaaatgctttaaataaacattggacccttggcctagtctaggctccagtggcaaaacacaaatcacattgcccgagcctcgccgttagtgtctcactttatctcgcatcgcgcacttctgcctgaagaaacgttggggctttttgtttttcttgctgaaaatatggccatcataagtcagcctaaatgcgtcagttctatgcgtaatagaagctcccatccattgttcaatgtaagcttaatgaaacaagtctaaaccgaaaaaaaaaaaaagaaatctctccctcggggaatcgaaccccggtctcccgcgcttatcggttttaatgacaagcggaaatcatcaccactagaccaaggaagaatgcgatgaccgagttactgctcggccacttggctggttgatgtgaggacatgaccatcttgtcattataagcgagcatccaatataattcaccttgtagtcaacaaaataatcatggaagcttcaatcaaaattttattcaggcaatttcgataaatatcttttccagtccaaggcaccatagctgaaggtttaatctattcatgagtgggcaaaaatcgataaccgcacgcaggtcatatatatatccctaaacggtaatagcctggcggtgaatattaataggttattacatacaagtataaaattaatcgcctgctacgtcgtatgtaagtgaaatgaattcgcacagatttccatcggaggcaaatcaactgcaatgtattcaaccaaatcagtccaaatagtcacctttgtctggaatagtttgttcagccactggtatccacgcgtggtaataaatggatcgccgcgtgtgactaagagttcaatgtagggatttcccgtgtaggtattggccgtgtgggtattcgccggatgggctgatgtcaaccatgtaggtattctccaaataggtgatcgccatgtaggtattgcccacatataagagaaggggatggccttgtttctgcgtaggttgagggagttgcacaaggtacataattatcactttaccaacaatggatattttcctggacgttctagatactttggtcctcgaccggtgctacgcagtactctcgccagacccaacagccatctccaacaatgatactcaagccactgcccatttgaaccaacatgtcggggtatattaccctatgcagccctcgaagtgggcggaggcaagcctctggaagagagacgacattgccagacaagcattgtcactgtacgtgattatatggtaagtcccttcactcaaagtaaccacagcatcctagaaactgagacctcgatacgcaacaggcttttcgcaatgataatgtacctcctcggtagccttctcctatatcacaccctcttcgacaaaagactactccaacacccgcgcttcctcgcacaccaagtcaagctcgagatcaaccaaggcatctccgcaatcccagtcatggccctcctcaccgtcccattctttctagctgagataaggggctggtcgaagctatatgatctcaccagcgactccccgttcttcggatacaccttgctccagtatccattgttcatctgcttcacagatagtggcatttactggatacaccgtggtctgcatcatcctagcgtctatcgctggcttcacaagccacaccataaatgggcggtgccgactccgttcgctagttatgcgtttcaccctctggatggatgggcgcagagtctcccctaccatgtttacccgttgctctttccgttgcagaagggagcatatctgggactgtttatgtttgtcactgtgtggacggtgctgattcgtgagtttttatgatctacttgcaacgagagtatgatggctgacattgattctacagacgacgctgagtacttgccaacatcggtggtaatcaacggcgcttcttgtcacacgatgcatcacttgtacttcaattacaattacgggcagtttacaacggcatgggatcgcctcgcgggaacataccgaaagcctaagggggatagtttcatggaaggtcagcaaatggatgggaaagggaaactcggaggtaagtgtgaatagatggagatccgggaagggcctatcttgtatttaaatgtaacactctcttgacagggtagtcatttgagatgatattaatatttaatataaatactatgtgattttggatgtctgtttcctctcgagtgttcggaaaagcgaatttaccatgtacaacatttggttatattgtatttatactggaaattatggcggactttgatgacaccattgaatgaattcattcaaattccccaagtcatcagtagcagtgttatccatataccgaaggctgacatcagatctgccagtagcatccagagtggcattcaacaaccaccaaagctcctgggcgtgtttcggatacccaagatgaaggaattgatccttatctaggagaccaatgacagaatcccagatgcgtctccaattgctagacgcacaccgtattctatcgagcgataggtatcttaataagccagctctcgcttggaaggcgagagaattaatggctatatgatattcttagcaattaatcaatggctgattccagttatcaacataccgtaaatcagaatcagaagatgctcaactgacaccgaaagactccatggtattgggtcattacctagaggagtttcaagcaactgcgtgatcacatcttttagaggaggaagtgggagctctgtcgagtgcgacatggcaattctgctgaaagaagatgcactttcggcttcccatagcccagcactccaaggaaaatgacagtccatctcaaagactgatattgatgggtggtttttgaagcagacggtgagaaatccgtccgctaaaaagacccaacaagcgattcttggaactggttagcgatgcatttcaagagaagacaagataagaaagactaggatataaagtaccttatacacacttcctctgccaccaaatttctccaagtcatctcatcacaaacggtgggagcggctcctcgcttgagctggaaaatccctagggatcggatggtggatactaaacatggatgtcggacgatgcggatacgacgtctcgtttgcatactgtcttgtccaaattgaagcatctcaataataagagcactctgcattagctgtacatttgataaaagatgcgactggtctttcggtgaagtgagtgttgataggtccgcaattttgcgaaatatatactcttccgcgacgtcgaacagtccggatggtagggcccctccatctagtggaatagtatatgtggcaccggatagaaatattgcgagtaacagagcattggagatgtttcctgggtcgaaggttggaaaatgcaccacgggtaaatgccaatgcagtgagtgaaagaacgcagagatagaagcagagatattggaaacccccaggagagtagaaagctccataaaatcaagcgggcttagcgttcctgtgcttcccagacccattgactttgaagtgtcgaccaactccgtcataatctcggataattggttggaaagctttgaagggaagagtgtatcaggattgaactggagtaggtaatcatccgtgaaagatggcagagtcgatggtacttggaaagataaatttgtaagttggaaatcaccatcaaaagctgacataggatcagtaggaacgagggcatcttcgatatgggaattgagtgtttcgaggtttcgtcgaacagaacactttgcagtctccccaatcgccagtctatctctttggaaagaaggattggcaaagtgttggagaaaagaaaacgacccactgtctctcgagttcgctcgcgatgtggttatcgaaggcgagagcgaggttactgcggagcaactgggatccccggatatctcttgggttacgaaagtacattctcgcccaaaggagcgacagcgagagcaaggtaaatttcggtcgcaggatgctttggcaaagtagcatagatcacacgaatgccttttcctacctggcttggctgcaggaggcgcaggttgattgaattttttcgcacagtttttgatatgtcttcgtgtgacctcactttcgagcattagatgttatcattatttatagtaatgatactttacatacggctttagaaatgatttgctgcatagaggacagctagaagagagctgctgtgtatctgggagatgatcagcctatgcataatttgtaagggcgttcattggaccttacgggtcacttcatggcgaattaaatgagtcttcctctggtaggctttttcgcattgtgtacattgaaacatgacgtcgacaccagtgttgttacaatctgaatgagaaaggaaggggaaaggggcagtgggcagtgggcggttgcgagtcagcgcgtggacgaattccatccgtgcgtggccgtatccccgacaaatcgtatttattctaacgtcgcaaaattgaagaaattcaatctcaacatgctattctattattgtcttgaatgaagatgagatgagaacagaaatgaacaatctcctggcgcatgcatgtcggtgactttcccaaatatcattatgtatgctatatatatcatgaaaaggaccagcattcttttttcccgtggcccagactgccaggaggaagcttttcattagcaaattttagtatgcagcgctattactccgtacccttgcagactctacatagcatggcatgatccaagcccagtcccagtgatttattgaagccttagggctgggcattgcctgaataaatgacaaattcgggtatagtcaccccgagaaggttttctcaagtgctagtttcctacttattttgccaacgccatgaaaagtaagctgattctttggggcaaactaacggaactttccgaacccctggcgtgcacggaacctggcgtacgtcaaattcgatgattagtggatcaatagaaaatctttttcaaaatcaagttgtagtatcacatcaactagtcgagaaagtctccttcgctcaagcacacggggtgttaggtaaattattatcaatctgcactctgtagatataccgaattttgtatatgagaaggggtggagctattaaaacgggacaaagctcaggatcaaagatgaacactcgcgtgcacgccagactgcagatcactctgcagatgcggaaacagacgttgtggatcataacaagatcgtaagcctggtggggcgcacatctctagcgcagccaaggaggtcaaggcacccccaagggttaaaagaccatatggggtagtgtggaatttataccctgaatttcgaaagttgcgcaatacttcgacgtccgagtatgccatgtcgtgtctgatttgtagggagtagggaatacagaatattttcccctggaaaaaaccgatccggattgcttggcttcgaatgagtcttgaaatgcaccgttcctgactacagacccttgcacgcaggtagccggggttccagatcagataggaggcacatgatgactagtctggggctacgaggactcgaatttggtcgtacagacattttcctggtccaatttgaatttttcggcttattaccccgaatagccctatattgaaactgatgccttgcttggagtgcccctgaactgagatatcacgagcacaaagaactgcctgagatacgtgcatatgggggctggactagctcggactacccccgagcgcattaactaaggcgctaattgcattagcggcccgggagtgaagtgataggtctagcataaggtttggatatcaggtttggttcgttgaccaacttgtcaaccaaaaacgagggaaattaggagcaggggaccaataagaaagttattgacaagcagaatgggctggtctagtctttcttgtttgggctaggcagtacgttgtgatgtagatcgacgtttcctcccctatttttgagatttctataacgaccgactgatggattggcacatataaggctgcctgtctctcttattcattcctgttcttcatctcttcgttgttagtttttttccacccaacactcgcttttgctggtatcattcagcgtccattctttctttcactctaaatatacttccaactcgcaaatatgaagcaatccatgatcacttcgcttgtggctctcgcagcttcatgctctgtaaggaaaaccgtgccattgttgctgtcgcaatttgacgtacactaacagattgtgtcactatagggagcccaagccactgagagcttgattagcgtgcccgttaatctctgcgccgccatcctcggagaggctgcatgcaagcagcagaccgtcaccaagggactgatcagcgtgcccgtcaacgcgtgtgtcgcagtccttggaaaagccaagtgtgaccaggtctcttccgctctcctcggcaaccacggtctccacacccgcgacagcttgattagcgtgcccgttaatctctgcaccgccatcctcggagaggccgaatgcaagcagaagaccaccagcaatggtctcatcagcgtgcctgtcaacacctgcgtggctgtccttggagaggccgagtgtgaccagacctcttcctcctctggcagcggcgacggtgccttgatcagtgttccgatcaacgtttgtctggctgtcctcggtgaggccgagtgccagcagaaatctacctctactggtagtttgatcgatatccccatcaacctgtgcctggccgtcttgggtgaggttgattgccgtgatggatcgtccaccccgcctcccgccattgccaccccatcttcccccgcggagaccactaccccggttgtgattccaggaaagactaccatcccggctattgtaccgggtgagactacagttcccactgttcctgttgttgttcctggcgagtctactactcccgtcgttgtgccaggcaccaccatccctgtcgttgtgccgggtgagactaccgttcccactgttcccgttactgttccgtgcgagtccaccatccctgtagttgttccgggcgaatctaccacccccgtcgtcgtgccaggtgagaccaccaacactgtcgctgttccgggaaagactacagtccccactgtccctgttctcgttcctgccgagtctaccacccccgtcgctgttccggttgagacttccacccccgtcgctgttccggttgagacttccacccccgttgttgtgccaggcgagtcttccatccctgccgccgaggcttctaccaccacagtctggactggccctaagggacctggctctcctcactcctccggtgatgcctccgcctgggttcctacatacacccgtgttccttccgtcaccgtgggacgtccatcccacaccggcagcttcacccgtgttactgctacctctaccaaggccatcactggatccaagacctataccggcattgtggctcacacttctcccgcctccggtggcaacggaagcaagcccagcgccagcaccattccgttcaacgcagctggtcgtgctactttgtccggcgttgccgtggtgttcggtgctctctgcgctgttgctatgcagatttgagtggtggataatcctgacaaaggtggtggctggtggctggtggggatagttgggttgctcattgttgagatttatgttcctgttgcgttggacatatcagtccgttttactcattctccttctatattcgttaaatcaacatgaggtaatataattacacgatatacgtctctcaaattggtttttgttctcgcagtttagactgtctatgcatatgatgactctattgattatcaggatgtttcttgattcttgtacagtagtttaatgattcttgattgtaaaagaagtatcatgtgtattcgtagaaaagcaaaaagctagcgtggtacgcgtaccgataatcacgggggtcccagaaaactaataatagactatgtgacagatcgtatgcgaggggccatactccgtgcagatctatttctcaaaccaaagcaagtcgtatacaatgatacatagaggggggattcccaaaatccggggaagcgggtctgcgggtccaagttcgagtccttcatgttcccgaaagaaaaaaaatatggtagcctcccctaatttgtgtcatgagagatctactcatttaaaccagccgcgtaacgggttctatgcaggtgcgttgttagcgaatctcaatcggtcctacccccgacgaagggaccaggcggaccaacacctgttaggattcctgtgttctgagggatctcgccctgggtgaacgcgcgatctccgggttcttgcagttaacggaaggtggacagccttggcccagagaccgcaccgacggtcagatatcactgagctaagtggagctataactgttctgtttgtttgttataacagagctttttttattcttgtgatttgatcggtggatatctcaaggttgttcttcttaattaggtaatcatgaagctattccaaggttcaggcatttgacccttcgcagatcgtatgctaagtgagaattcatattattgcctaccgccaactttttgaaagagtatattaactagtattcttttatttcttcttgctgaaactctctcggcgtattttccaacgaaattcagagaggaaactgggccgcgagttggctgcaagggggttccgctatcggcagcttgctttttttctagctcatgagatcctggtatttcattggagtgctggcaaggtgttgagttccaaggatggcatggacttcaataaattaccatttaggtttcttctaggcattagtccggtttcttctgatccgtacacgaatcattgttgcccaccgcaatccattcctttgttctatgcgcactctcaatctgccttatcggtaactccaaatacctcccttaagcgagtatcatactcaattctatcctgtcgctttgtggctccaatcctcacaaaatcctgagaccagtaccatgacattgtctcttggaaggcctcatccggattctgacaatattgactaaagcggggctgaatttgcttgtagaagaccgaaaagagaccgggcttgcgagtgcaagagagaaccagaacgttccagatcgccagctccggtccattatcccagagaggtttgcctttcgagaagcctccccaaataatccttcttcattttccaaaatttccataagttcagtcctggctgcttcataatcgactgcatcttcggatatttctcggtcttggatttcgagtaacaaaggacgatttgtcaattggaggtaaccgtctttgtcgataacgaacgagccaattgacgggagaggtacacgcgctagacttagaaaaatccgagagagatcgcgaaaaaatgtgcgccggtagagggtcttagtctttttcccgccaggtagacgaaagcatttgtcccacattcctctcgatgtgctcgataaccaagtagcctggatccaacgcatcgcttcggtatctcgatactcgggatttattgtgaacatacgacgaaggaagggaacgtcctaaagacgaaagaaacaggcggcggaggtgttggaaataccggcttagtagagggagattgtcgatgtgcgagagctaggaaagtccatcagtatggtgccggttggttgtaaaaagaatggaagccacacagtctctccatcagaaggcgcaaacccgtaaagacggggaatgggtatgtcagggcaattatcttgtagccaagcatacgtccctgcttcgcatcgaatcttctcatcgcaattccctgtacaaaagtcctcgcctagtcggtgtgaaagaggaagtcgaagcaggactcgagtccccggctgttttctgactttccaatcgctgacagtgacaggtatacagacgttgaaacttccatgaagccaatctttaacatcggccacttgacatgagacggtcgatgaaaggcatgatgcgtgacaacatccttgatccaatcccgataattattgagactggcaaaaaactcgtgtctttgactgggatattcgagtcgacgtaagatgttgacctcttcttttcgtgcctttgagtaagtgatctcacctctcaacagagggagggtcttcggcattgtgtaggtccttgagaatggactttccttaccagtgagagcagattccaggccaccgcttgaaaattgcaggttcgtaggtacgacgttgtggatcaaattgtcaactcgatgagcgccaaaccctgcaaataggggtagttgcctggttgcctaagacgtggtgtttgcttgtatagacgttgtttaaactcaggtttgacacttcctgggagagctgatgagataggactgtaatcgtgggtccacagctttctcaggtatggaggtgtttgtggagagttcaggtcccacgggtgttgccatcgggtcccacgttagcttccgctgtaaagcttatgctaaattcctataaccaatacaaaaaaaaaaaaaacaaattatgtagagtcaagactccattaacaaggtcaaaatcgaagaagacattagaaatcagaatgtcggtaaaaatgccaaaaaatcctctgacccgggatcgaaccagggacctcaagatgacaggttctttgcagaacaggacaattacagtcttgcgctcttccagctgagctatcaggggatgtgattagaataaactttcctttcttgatatatgaggacaaaaatgttaaaaatcattaacccaaaaaatcccctgacccgggatcgaaccagggacctcaagatgacaggttctttgcagaacaggacaattacagtcttgcgctcttccagctgagctatcagaggggtgattgaaggatgggcggaatttggatattataacctggctgaatccatgtctttgggctgcgaatgttgtttctggtgtgatggtaggccaagtgaatgagaactgcccaatctagtcacatgatgttaggctggtggaaataattccacctggccgctctgcagcatacgggatagttcacactgcatgctgtacacatctaaaaccaaaaaaaggaactataacaatgcggaattcctgaatatatagttgcctccatgtgcagctatcaaaaaatggaaatcacaactataatacagcaatagccccaggaggcgagcccactccacccttaagatgcaacggcgcactagtcaagaagaaagaccacttgttcaacgccgcgcattgtgtgctcagcttttccaggtcccataattccccgatcggagtaccccactgacacagtagccactcatgcaggcaacagtcctgagcataaggccaagcttcgaatcccatggtatcacaggccactgcagaaaactgtttatcgtatagccacctgacggttttcatgttgccttcgattccaatatattggcaagatctgacgcctttggcccttgcctcgggatctgccgtcctgtactgaagtcagctagaaactcatgatacgctgggaataggtgctttcttactcgtgccatttgacgaaccccgtccggaggatgaatatatcacccggtttgcattgcgtgccttgccattttaaggtttcttcgatttctgacagcggaatggcccaattactgacggcgttaggaggagtgcttgttggattgtggtgctgccaccatctcaactgggcatctgggtcagttgactgaaattaaaaagtagatctcgtgccaacatacccaatcaactaagatgcctcgtccaacaatgcccccgcgctcgcagatgtctgctagccatcagtcattggccctccacgacaattcgtttcacttactatgaattccgttctcgggccccttaactgcatcctttaatgtgagcccgttataaaaaaccgcttggtcctgaatcgcccactatgtatagaatgactgtaaacaccaaaacttggaagtgaggcaaggaaaaacgaacgtgtttgagactatcccactgtgaactagtctgggtattgatataaatttcatcgtcaagaccaacaaagccctcagcctccatctctttgacatgatgacacaatgtagcccgtccagatcccggaaattgtagattattcatggaccagtcaagctggacatgatttccgaattggatctcttttgctgcctcccgcaccaccgatgggctgaggaagttgagagctgataacgtcaaaaatcttagaatagggtaggaaacaaaggccgaacttacttcctaactcgtctttcttgccaggcttgtcaaagaacccccagaggcatccttgcggctggccagctacaggcgggagatcttcgaatttcgggagaatataccgtggctcccggtgatcgacattttcatacgatgccatcttatatgctcctatccagtgttgaaaccttttgaagcggccagggagacctctttaagcgcggagaggacacccttaccgagatttggggtcaaatgccgagtaatctcgcttagccccgcaacttcacttccatgatggcttcccgtgccggtggggacgagtagccagtccccccaccttgtgcttgaagaaaaggccgaagaaagatgggtcaatcactccgtactccgtaccgatatccagctctaggggcttcaaagccccaagcaaggtagatggcaacacacattactggaaaatggattgttgttgatctagaatgtcccgtcggcatcttaggagcgtcggagaaaagctgtcccgagaagccgaaatagttggcaccacgtggaaacgggtaggttaccgtattgggcagttgggtggatagtcaatatcgagtggtacaaatacttttgaatgggagtctattacagtgtggatgtttctgagaaaaataataactgtttgtcggtaaacaattctgcttgcaggaaatggtccttagaccagatcagccgtgcaagtacgaattaagtgtccctggggcggtagaaatctcccctctccaacaacctaatatgactttccctccgaatatatcagagacatccgggaaaatgccgtttttgtagcgtgattcaatatcatggtctatcacgtcttgtcgtcggagtcgagctttgatgatatccggatcgtcggatttcggcccataaagttcgctatatagtgcctcgccaataactagcttaaatagggtagatcctagggcgaagatgtcggaagcttccgtgttgggaaaatcataatctcttggtaagcagtgtgatgctttctcatagccaagcgctacgtggccaggacactgcgaagaattgaaatcgccaagtcgtagatcaaagttctcgtcaatgaagaactgacgtagagcaaggtcggaatggataacaccatggctatggatgaaaacaatagcttccaagagctgctgacaccatttggatcgaagctcgggagtgattggattcctccaagtatttaacaaagtcaccataaggatagtatgtgatcccgatatagtcggatatgccccttgatagccattcggcaatccgtggatgtgttccaagaatatcgtagatcagagcctcacgtagtataggtcgtagatcttcttcactctgactgcggggaattttccgtatgataagatcgtccaaaaggtttacttcggcgaatattccaattgtcaagagctcgtgattatcccggcgttcggaggctggtcgaatagtgacggtagggagtggtcgaatagggaaggtaggtagcgtattttcggaggactggatatcgacctaaaggatgatattaaacagagttaataagaatcatgttttccacccacagattgcaagcgctcatcatctgtaatatttttcattaggtgccgtcgaagaaaacgtaataaataggcgtctaagcggccggaggaatagactgagaataatcgtcggaaccaatgttgcgcttgtcattatttggaaaagacggtgaaacagagagaatgatgaatatgtactccgtatgttgtacgcagatgcagtagacatgtgaccgttactactccgcaatgttcgtaatttttgcacgctggggtggcttagaccgtactaaagaattgtatatagattcgccggtatcgaggtggacgaggaaaggggggaaatgagaagggaccggagctatctactctagctacgtgtgggacctgtaacttttgcttgtcatgaagttgagcccacaactcaatttgctagggttcgataacaaagatgggttggtactttatatgactgatattggcaaagcagtcctcaagagtgagccctcaagtaaacagtctggacgaggaattttgtaatgaattcaaaccttttcactcccttgaccagggaaatcttcaacctcatccacatagtgcttatcgccaatcttcctgtccttgtcaccctctaaagctttctcatcgaagggcgagttgaaaaggtcagaaatctcttccaacgacttacgcccagtcttctcggagtcagcagagtatctggaggttgacagtttcatttgataaagacttacctcgggacagtagagcagcacaaatgcaagcgttgctgaggtgcaggcaatgaaaacaatataatatctccatccaatggtagcgaaggctgtaggtgcacattgcaagaatataatcgtggcaagaaacaaaccagagattgaaactgccagacctctcgcacgcacaggtgtagggaagatctcggaggcgtaaatgtatgacgttgcatcacacgtagttgaaaagcatgccatgtggaagaaaaggaaaaagattgctgcgttgacggcggctttggatccattatgttggaaaatactaaccgagatgcattcaccaatcaatgccactatcacgccagtataaccggccatgagtagccgagtgcgtcctactcgatcagctagcagagagttgatcaagttcccgaagggggaaattgtaatccagccagcctgaatgagcagctgggagtttgttttgaagccaagggatttgtaaagcgatggaccgtagtctaattaccgttagtaaagcctggtagggtttggacggataaagtactgttaataaccaaggtggccgttccctggcatccgaagagaaccacgaagcctatgatacatcttttccgaagggcaggtgtggtcacaagagccttgaagctatgatcctccgtattttccacacggatcatactgcatagattggcaaagtttgccgccaattcttcatcgtcttcaggggtcggtgtgtctgacgaagcagacactgctttgtacgcttcccatgcctgatcaatgcggtcattgtatattaaccagcgaggggactctggcagaaacataacaccgattgtcaggaaaatagggggcacgcattgaatagccagcggtatcctccactggaccgcagaagcctgaacgaaggagaatccaaacccgatccaactagataaggcatatcccacgcagatcatcacaccgtgagatcccacaagcaggcctctaatacgaggtggagcaatttccgactgatacaaggggattaaagcaaccagggcaccttgaagtttcagatatttagcgagatcgtagcgagcgaggaaagaccataccaacaccaagcccagtcacaaagcggaagacaaggtacgcgccaatgtgaatacctgcaacttgcaaggctcccccgatggcactggtcaaggaggccagcataatcgactttcgccttccgaggatgtctgcaaatgcgatacatgacaagcagccgaaaagccctcccgcctggaagagagcattgatagcaccttccaagctactggcatttttgcgcgtatccaaatcaaagtacgagagaaatgagggctgggcgagagtgcttgagatgatactggagcaatatccgtaggtcacactgcccagtgcaacatacacagagatctaggtaggatatgagccgtctgatgaactgaacgaataaatcaaggactgaccaaaatgcgaaacatagaatttgagagatgcatcttgtgtatggagctttggtcgtacggtgtcatgaaccagtgaagcaatccctgaagagtaggaaagcagatttccccggtgtctgaatctggggcccccgggcccagctcccgggtcaccccacacccaagataccgaggaggaagaagtttatattgatcagctcaagtggaaattggctccgctagtcacagtccaaattgcgtagaatctcgaaagtgggatacatacatccgactttgaaagaaacaacgtagagaatcctactgaacgtagtttaatatcgatcccatcaaacatcgatggcacccgaattcctcctgtttcccctcggctgtttcttttttttttttgcttttcggcgactccaaaaagtggagcactggtggtttatatccacaatcgaaacgacgttgagagtaaacttcccgaaaacgacaaaagaccttcgcctcctacttgaacgtgggttggatgttcggtaaaaaccttcttgccaaccattttagccctgtagagcaaaattggagatatgcagagctcggtatctcccatgggaagctcaaattacccgcccagtcacgtggaatatttattggtgtgggtagccccacttggcccgtccgtgggagccccacaaatcacatggccatccactttcgctaaacattaactaactcgtgaagaagggacccaggggcaccacagccctgcttgcgaaactgagtgagagcaaaattttcaatgggagtagtagggtgttagaaaggagaacattatggggtgactactagaagaagggaagaaggtggaaggtgtccgcgttctagtctccgcctcagggtactccgtacttttatatcaatcatatcaatcgcatggcttcaagcaattattcattagtcaatttttagtcatcctacactaaaccctggaataaacatgagtcaagctttccctatctagattatagatctgacagtgaaaggtctgaaatagggcaagcatccctgaatacctgaaaatttcacagtacacgatagccatgtcaacccgactgtaaatcatttactggtaaatatgagcaatacaaatctctaattccgtggactgacagcaaagctaacaatgtgacaccccatagcgtggtggaggcactatgaattcatactagaaaatgttagagtgttccaataccacgctatgaagaatcttacttgatcaaaatagtctttggctcagtaaatgctcgtaaggcctgggaaagtcagtaaatagcaaactcttaaagttcgatgaacgaatgctcacatattcgccaaattctcttccaattccagaggctttcttaccaccgaaaggtacttggatgttcatctgccctgttttagccaatgacaacacatgtccaccatggaaatgacataccacactgacacaattaacacctactacaccagattctatctttgaagaaactctcatggcacgattgatgtctcgcgtgaatactcctgccatcagaccatactcggtatcattggccaattcaatgacttcagcttctgtatcaaaagtcttgatcaccgagaccggtccgaagacctcatttttgtaaatttcagcgtccggcttggggttcaggaagacggttggttcgaggaaacatccctgatcgccaatgcggtttccgcccacggccagctcgcattcattcttagcccgtgcaatcattgcctggactttttcaaaggctgcggcatctgctagtggtccgaacttggtttcaacttcctggggatcaccgatgtcttttaccgcttctttcatccgcgcacaatatagatcaatgaatttggaagcgattgaacgctggacgtagacacgagatgccgcgacacaaacttggcccgtccgcgctaagatcccgttgattgtcctgtatattgtcattatactgctctcaaccttagaggctttgaactcataccatgtaactgcattttccaggttggcgtcctcgaatatcactgccgggcttttgccacctaagtttcagtcagtaggcttacttcctcgagcttgcatcatctcgacctaccaagctctaatgtgacccgctttagattgctttgagctgcagcaacttggattttctttccggtcgcaacacttccagtaaagctgatctttacaagtggtttagtaacaattttcaaatgagctttgacggatattgaatattccttcttacctttcttactctcatatggctagcaagccgcgcccctgtactgccatcccctgttaaaacttggacgacaccaggcgggaatcccgcttgctcaaatagtgctgcaactgccaaggaacctaacgggctcttttccgatggcttcacaatgagtacatttccggttgccagacatggtgcagctttgatgaaaagggatgccactggtgaattgtaagggttgatggcaacacagacactgttagatttgtcagtatcaattttgtacagaaataaaaatacgttatgtggagcggcgtacccaataggctcatgcctgacaagctttacaaacccgtcgtcgtcagggaagtaatctccgcgttgcttgtctgtccagcccgctacaataaatattagcgtctagggcctgtaaaacgtttcaattaattctcgcagcaccctaccatagtataaaagacagttccgaatgtagttgctctctcgggtcggaatgagtgagaccgggttccccgtcgtcaaagagtcaagacgcagaatttcaggcaatttctcctcgagcagattgatcaatcggtgaaaacaagccgagcgctcggtagcgctaaacttcgaccacggaccattgaatgctgcttcagcgaaccttacggcgttgtcgacatcgacatcgtccgctatgggaattccatctgcgacaagtgtgttgtccttcgggtttaggatggaaatggactcggatgaatgagaggcgctatacgctccattaagatacaactgattgaatgtaattggaatagacgaattgaggagagacatttttgccgtgaagttgatgagaggcttcaatttaactttactagataatttccgtaggcttcttcttatatgacaaaagaacatgagatcacgaaacgccgggtagattatattcggcttctcaagaatctttatccgagaatgaaaaacaagatgatatgagttccctacaatagtccggggtccggggaaggtttggccctttcctctcggcttctcggcgcggcactttcgctccgagtaaagagaccgaacgccacggatgaactaataaattgggatagaaatctatgaaatgaatttttcgagaaagggaaaggatcaagttcacattctcaatcatgtctatgaaagctgttgttttccgaggcccgttcgacatccgtgtcgaacagaagccaagaccgcggatccaagatgatacggatgccataattcgagtcacattggcaggaatatgtggaaggtatgaagtgtaccatatctgaagatttgcaattggctaattggcatagtgaacttcacatgtatcgcggccatcaacaaacggccaccgggcacatcatggtaagtcgtatgaatcaagtgacacgacaaggctaatatcaatgaagggtcatgagttcgtcggaatcgtcgaggaaacaggaaaggatgtcgccctgtttcaccccggtgatgagatcgtatctatattttctccagtctggtaagtttacaggcctgggtatcgtttacttccagctgctgatgataaaaagtttgaaatgctggttctgtcttcagggtttaacaaatcgttgcgtcaatggtgtggcgtttggcaccagcttgctcaacggcggtcaagccgaatacgtccgcgtccctttcgccgatggcacccttcagcatgttccagcaaaactagatcgccgactgctcatcatgatgtccgacatctttccaacaggatactacggcgcacagcgagctattgagggtcttcgcacacagtataattccagactcacatctttcaatttgaaaacagcaaatgagaagctccatgagtcgaccgttgttattcttggttgtgggccggtaggaatctgtgccattgctgcagctcgctcagagggaatcaagaccgtgtttgcgattgatagcgttaaagaccgcttggatgaggctgaacagttcggcgcgatcccgctcatgctcggagaggacgatataaatgctcgagtgctggaggcaactgacaatcgaggagcagatgccgttgttgaggttgtcggaaataaacccgcacttcgctctgcatttgatctactacgcccatgtggtgttttgtcatcagtgggcttccatcaaggcgagctacccttcacaggccttgaatgctatcaaaagaacatcacgttagtttcttcccttcctcgattaggttgcccggtctaacttcatgccctagtgttaactttggacgcgtacccgtccgtaccgtgttcgaggatgcgttgcagtgcttgacggaaaaccaggagaagatgcaaagctatattacgcatgagttaccactggatgatgctgccaaggggtatgatatatttgaacagaggaaagcgagaaaggtcatcctcaacatttcgaaatagctgaattgaattgaacataatcaagtccttacctacacgtaaagttcatttcatctataaatcatgatcaatagcgtggacaattcggcatgataaggtttagcgtacacatttttggatctggaggtctctaacaccgccgatgatagcctctgcctcggcgggttggaccgatcagccccgaggaaagtaccatggcctcatttccgacgcttaatctgaccaatcacttgaggtccaaataaatcaataaccgtttaggtcaagtgggatgtggggatgtactccgtaccgtaggacgtgaatgtgttgccgtcggcttcttccaatcatcgccgcgtggttagtcagcaatccttcggcttcatcttccccgcatgcaccccagattttgactgacctgtaagtgatcccggggtccgctgctcggggacttctcttctaacaacggcaatggatatcgcaaatagggaagccgagggcccgaagcagagacgcacacgcgtggcgtgtcgccggtgtaattcaaaaaagatcaagtgcaactcacaagaggaagttccctgtaaaggatgcgtgtcaaccaatacagactgtgtgcccatagaatcacagcgagggcggtatgtgccagtgtcaagtgacatctttttcgaaacataacggggtaatcttactaatgttctgcgtctaggtacattcgcaaaggtcctagggcaagaaatgctggaaaatcgcacgtccctcagaacgataaagagataccaccaatagcccgctcgtcgaatttccctactagtggtgttgaccatcttgccgagtcggaaatacccttgcctcccgaggatcagacatctagctccttccaaagaacactcgatgcatctgatcaagacagtgattgcaggttctacttgcatatcgcggaccaaggtgtcagctcaacacctcaacctatctcaagtcaaaagggcactctctttcttggcgaatcctttagcctgacatacgtcgttcacgacgtcctggcaccccttctcagcacagagtgtgcacccaactaccgcagacgcctccatttccctgtcgatgaaggattcgatccatctatgagaggtcagcaaaatatggttgaagcgcagacaaagctgctccatagcagagatctatggttccatccagaccaacgagccttagaacagcttcttgccatatacttcaagtggtttcatccagcgttccccattctcgaaaaatccagttttttacaaaaatatagtgagaatcagttatcgttacttttactcaatggtgtgctcatgattgccgttacggtctgtgacgaggcagacttggcacttcttgggcttcaagatcgctacaaggcacgcgagcttttttacaaacaagcccgcgcattatatgagactgactccgaccctgataaaattaacaatgtggtggcttctttcttgattagtttctggtggggtggtcccaatgatcaaaaagactcgtggcactggctggggattgcaataagctcggcccagaaccttggcatgcatcgttcgtatgtatattttgcttggctcatggtgtttgtatactgacaatttattcttttgctcaggacagcgaagtctcatatgtctagccaccgagtacgaatatggaggcgcatatggtggtgtttacgagtaagtatccgcttgatcttgtcgtactctctttctgacctagtaaaacccagatacgagatgttttggtcagtagctcgattggccgcccgcagcacttttcagtgtatgattgcgatgtggaaatgctctcgtcgcatgacctggagggcgagtttcaaaatgagacagaaatacactatgtttgtcagatggcccgtctttccacgatatgtgagtattccgatcttagattcatttctgttaggctaattgacaaatggatagtcggtgacatcatttcctcacggtatgcggcggtaaaacccgatcatccttcacagatgaagattcagctcgagaaagaactggatgactttcgctcgcaaatgccaacaattttgagatatactggaattgacgcagagggtaagatatgtctatggtcagcaatgctactaatggcgtacaagttagttcccctccctcatgattacatgtacatcatactgagacctggacagctttggagtcattcttctttgtcggcctccccatagcaatggcttagacatgtctcaatcatggggcaaccctttcaaagcttcatcggccgcaaatgaagtcacccgagtgatagaagatatactctcactctcaatgggaagggtctgtcaaattcacacgtatgatagtccacccaattgcagcatgagactcggctgacccccggaaatagaatcccggcactcttcaactcccttgctatacatgttttcacgatatgtacctcgcgcgctattggaagggaactcgccgaaaaccgagcacgtacctgtatgctgggtctaacgtctctacaagaatcctggcccgttagtgggtggattctgcggcttttcgtttatatcatggagcgattgaagtccacgtccaaatcaccgactatccctggatctaggccaggtctcttggatacaggtcctcatttggggccgggctcgcacgtaactgatacaccagccgcaaacactccgcgacaggtgcgtgatggtataaacactccaaaccagcaaacacaggccagttcgcatgcagctggaaacatatttgaggatttggatacatttcccgagatgtttgttcctaatatgtttcttccggacgcgtattacgagggccatggagtgggccaagcggacttttttgatctgctacgggttcctgactgggataacatggccatatcatatagttcttgagaattgtaagtatcaaaatataatttgcctgatatactgcatacacattttctcacttactatttactctttagaatcggaggcgctcacagccctagagcttgaaaaattacccccacgcatcgcttgacaaccaaatcggcgcacgcagctctctagtctatcttacaataaacacgcaatcgcagctgaatattcgccagtgattgtgggaatctattgtgtttacatatgaccaattacttcagcgcgtgataggcgcacccagaaaaattcagttctgtcctggcctgaaagcaatttaagccggaggagaaagaacggataaaagttccctagcttaagttttcctctgctgtgttgattgagcgtccgatggtatcattttagtctaaaaagactacgatggtgttagcgaccccccaaattgcaacattcttcacaccgcgccctatcaacaagctaattagataaatcgttcttatagaaagggttatctctagtaggaaaagaaatatttctaagacgatttaacgaaattttcatacttctgttattagacggctacacttgagatctcacatttctatgaccacaatgagtacggccactgcgcccacgcgaagatggtatcattggtattccccggatgatacgccagaagagagaaagttagtgttaaagctagatctgctgatcgtcccatatgcattcattgtctattggctcaagtacattgatcagggaaatatcagtaagtcaatcaggaaaatctatcaaaaccaatactaattgcaccattcagacaatgcatatctgtcaggaatggctgaagagctcaacttcactggtaacgaattagtccatttccagactattttcacagttggcaatgtcgttgcacttttgccttttatgtacctctttccgcgggtgccgatgcactggctcgtcccaactctcgatctcatgtggggaatctttactctgctgcagtatagagccacaagctatgcagaaattatggcttataggtttttagtctcaatcttcgaggtatgactccccaactgtccgaaaggaatccatttctcttactcatactgataggcatcctattttcccggtgtgcacttcgttctcggatcctggtataaaagcaacgagataggaagacgaggaggagccttctacgttggcctcaccctaggctacctgaccgctagtcttctgcagggtgccacactcgagtacctagatggggttaacggactaccagggtggcgatggctttttatcatcaatgctatcatgaccctaccgatggcgcttgttggctacttcatctatcccgggacagtcgataagcccaaccgtctcgtgatttcagaacacgatctagagatagctcgcaggcgactacaaagacagggaacccaagtcaaaagcgcctctttctcatgggcactcggcaagaagctctttttgtcgaagcgattctggctggttcttatatgggatgggttctttttcaactctagcgctaacacagcgtcttttctcttgtggttgaagagcctccaccgctacagctccgaggaaatgaaccagctcaactcaatcagcccggcacttggaatatttttcattctcttcgtcaatatcagcacggacttgtggcttgatcgcgcctgggctattacgctggcttcgagcttcaattttacggggctggtcattctggccatctggaatgtacccgaaggagccaaatggtttgcttacagtgtgcaatactcgtccgtcgcggtatcttctgtactgtatgggtggatgaacgtcctttaccgtgacaacctcgaggagcgcgcaatcgtactggttctggccactgctatttccacaatgtggacatgttggatcccgctcttcacgtacccaactgtggaaggacctcgctttagcaaaggataccctttttctgcagtcatggctgcttgcttggtgactatgacgttcgttattcgttatatctatggcccgaatgggtaagatctccttcatctttttcacgagggtgaccggttgctaatggaatgcagtgagaagaatataccatatgcgaacgatgaaaatgtgtccgaggatgagtcgacaggcacaattgcgatttctacaaccgagagagcgaagaaggaccaggtttctgttgtggggacgattttgtgatttgattaacgtatcttcatattgtacataagggtttcatcgcttagagcgttgagaggactcgctatcggaaaattgttggcgacctgaggttctacatatttgcaggacctttctttgtaaataaatttttcttcatgacaccgtccaagtgtattaatttgaacgtgaagatataatgagtagagatcaattacttccgatttatctcgctttttggtgaaaataggtagtcaaaactatagggttttgggatgaaacaggggcagggggtaactttatacagagttttcattatattaatctactctctaattacccattacaggttatctgagaaaccgtgaaattcaattgcattttaccatacgaatcaagtccttagcctctgttcatagaaatgcttcgtgccactgatagccgagggaaggaatgatgatatagtcggtactgccaggatcacgtgggcggtcacttgtaacacttcgaagggctgagctcaacagaaccagaattgacctagcaatatctcaaagaccttgcatttagaaaagaatgttatgtttatgtaggagtcggtcgtaaagctaacaaatagaatgcttaaagggtagttgtacacagaaaagtcctccgtacagcttccactttttcccgacggttgattcacatatcttaaaggggaaatatcagtaaaagagacataacaaaaccgcataagcggcggattattcttatcaaatataactagatgtagtacaaattccgctgtacccaatagtcaatgcacgtatataccaaaagactaaagagtgccttattacccaaacaaaaaccaattgactccttcctcccatctatacaaaatccacagcattattgccaaaacacgaatggtgcttgacctagggccgattgagctgttcacggcggtaaaagagaaggaaaccaaagctaaaatcacgattagtacattgccataatatgagttagggaaaggggcgggggtcactaacctagcaagaagctggaagaaaagggcaatccagaaccacgcattggcaactgtgtccagcgacgatccaacagcgggggagatgcttgctgggccgaccttgttgggcgcgaatccacgagcacaaattgtggcgatggatccaagagactgcgcggctaataggacgaaaacgacgtgtactcgtgttagcgtttgtaggagaatcattccaagaccgacttgttggatctcgtcgagaacgccgagccagagccagacacaccgggatgcgatggcgccggaagtcaggcctccagcccatggaaggtagtggccaatgttggatgttccccaccatgtttgcgcccatcgtggtgcaccgatactcaggccgaagacgggcaagatccaactgtgctccttggataagaagcggaagagtagcatcacagcgatccagaggataataaagaagaacaggaccaggaggacaatgtaccatggtttggtgtgctgagaggaccagaggaatgaccagtttcgaccgaacgcggcggaaaggaaccaattctggacgatgaccatgaagaagaaccagaggacgattcggcggcggaagagggaggtgtagaagaagaggatcttgccgggtgcttggcgatagtacttaggcaagccaagggcaagcagcataccgatgatgaaacaaaccgcggcaatgggcatcaccacagccgagagtctccaagaattcaaggcaactgtggaaacacctccaacttctgctgaagtgaccctggaactccagtaccacagggctacagtgtagagctgagagattccctggatcatactggcgcggaacatccaatccttcacagggacggcaccttggtcaccaaagttgagagcaaagaacaaggaaccactggaagatgctgcggcataggtacctgcggcgacattctgagcccacgcttgaccgagatccgagagtgcgaacggagaaacgccaatggtgatgaatgccatgcagtagatgaaccaggggagagagaggactatcacggacgggaagcggtagaagaggaaccaccaggcaatggaagagacgcagtagattgccgcgatcacgtagagcttgactgccgtctcaccaatctggccagccagcagggtgatctgcgcagagttcgttgcgataatctgtccgagacccaagaatagagcataaacaggccagtttccgacgcgccatctcatgaagcgctggatcgcaatgggtctcttgtatcccagacgagagagccacagatcaatttcatctgtgttgttctcattcgactcttcgtgaccttctgtgacgaggctgtacggtggggccggctcgtcagtcttgtccgagccacttccagtcacgggccgctccttgggctgcttcttcaactgcgcatcgctgtacatgtagaagaacttccgctcactcttcatgagataaagctcaatacagtaatctgaaatcgagttcttcttgttgaggttggtgagctgctgttcaaagtgccgcgtgaagtagcccatgctgtccgtaaaggtcgggtcgaccttttgcagatggaagttcggttgatcatgatcaccaacaacagaaggcaaggagaggacagacatattcggagcgtgagcgaagggtacagctgaatcagaaagatcccgagtcagtctcactggagaggggtccctcgacatgaaacgcgttgactctgaggtcgacgagattgactcgccagactgattactgtgtctggggtgcgcgccgaactccataggtgaattgactgctgccatggcctcttcttgagaaatgagtttctcctgtggtgtggcagtaccatcatcgtcggcgtccgtggtatcaccgtcggtgggctcggtgaactgactaccacgctgcgacttcctgaagagacgctttctgccatgtcctggtccagaccgtcgaccaagggacaggtttcgacccagcatgctacctctgttgctttcagccacttgcatctcttgagcttcgactgcctgtagctgcagaagggaaggctggaaaggctgtggtgctctaccaagtggtggcgtatccaaagccgtcgctgactggaatgatgaagggcgggtgaccagtgcagagtctcgcaacgctggtgtttcccagaagatttgagtgtctcgcgccgtgcctgcaacagtgagttgattcttttggtgatggatctgaatagatgtccgctgtaagacctcgagcttctgaacccactcgagaacggggaatcgctgcttggcagagttttcgcgcatctcttctcgggtctctggtgttgagtccaaagcggatttgatggcggttctcaactggtgcaagagatggcgggctgagtcagattcgacagtgtaccaccaaccaggcatctggcctagaccaccaatgcgagaaccaattccaagtgcacccttacgaccaaactcaacggcaatcaatccgaagggctcgtcgcgagacgggattagggcgaagtcggcaccagagaacacgaagggggggaggaccgtgaactgtggcttcgagcagacacggcctgggaacatttccacgatgcgttcgagcttgatagcagccagcttaccataaagatcaatgataggaccaatgcagatcagctggacattaggtctagcagacaggacagctggcataacatccgcaatcaagtcaactcccttctgcttagaccatcttccgacaaatactagcaagtcagcgctgggatcctcgtccagaccagcccacttctgtgcctgggctttgtcattggcgtgctcatcagcagactgaaccgtaacttgcacatcggggtccttcttcagggcggctgtgtcggagggatctggattaggaagactgccaatcttgccgaggctccagaagattgggtaacgggcccatgagcgctttccgtatttctcagacacaccgactgcgccaaagccacgttgatggaatcgcaaatagctagcaccagtgtgaagcaggttgaaaacgctgccaaactgacagtactttgtggccacttcgactgggagattgaacacagcacagacttctttcttctcttgtgcggtcctcagagcccaaagaccttggaactcggcattgtgcagagacaaacagactggaatagttcgcgacgggagcaggtaaagcggtgccacgcagccgtggaaatcgttgatgtgatagagatcaatcgagggtgttcgccgcattacctctgcaatacattgattccaggccgaatagtaaatcgcactgtcaaggtcatccatacgtggagggtatggctcggccttggtctgctggcggaaaaccggagcatcgagtagaacataggtgatgttatcgacaacgtgatactggaccttgactgagtagggatgatctaggatcgtcaccacgaaaggttcaacaggcgtatcctcagggtagtcaatatcgccgacacacgggaccacccagatgagattctggtgcttcagattttgggacatgagctgcgccatcactcccaggccaccaatcttgaccttgatcttccagtcttgaatgtcatactccatagtggcaatcaatacagtgcgtcgttgatcgctcgcgcctgccattcccatgattgttggcggagccttttctgccatattgatctcctcgacaccatctttggaaaacgttcctttgattctgcgccaaagcactaccggaaacttctcggccttgacggcattgccattcaggttgagtttgacacggtagaagtttccgatgaagataaagacaccggcacagcccataacaagcggaataacccagaaaagaataaagaggaccaactgggcccatccagatccgacgggaatcagttcgtaccttaggttgccatcgtttagggagatggtccagccaagatgcgggaacggtggcagaatggtgatgttgatgacgttggatgcgagataggacggtggaagcttttgaactgaagacgagttgccgacgtcaccgtagacctcggtattatcaggagtgccctctttgtcctggccccaaacgttcagctgacccacagctggccattcgtagacgaagtcgtaggtccagcgagacgttttggaatcgaacttcatcttgctgtccattcctgcatcatagccatattggttatatgggccgttgaaccaaatgtgcgggaatcttcggactgtggtgctcgcataatcaccttcctggaggtaatcactgcttccagtgagcctcgaaaagtactgcacccggatatgagttccgtcccacttctgggcgtccgtgccagtccaggctgggatggtaatagtcgtgttgccacctgaataagtcgtccaatcggtccagctcagaccgaaatcagccgtgtatcggaacttgtccgcaccagcagctctgtgctggatgtaaaggtcatcgttggacttgtgcactaggctggtagagtaattggcaagcggagaaatcaggggattatcagaagcgccgaggcggatcaagaacttgtcggtcgcattggtgtaaactccggaagtggaaacattttggacagtcaattggtggattccgtggtggacgttcttcaggtttgcagaccatgtccaaacagtcgggatttcgccggtgaagttatggctggtggtcctggcagagatattggcgcacttgacactatccgtatcaagcacggcggtgatgtttttctctgttgtagaatttaggtaaatggcatctgtgatgctgctgcagtccattgctttggaatatccaagctcaatgggcagggtttcgcccgtatcttccgaagatagcaaccgagcatcatgtccgggatagaaatcggtgacggtagggccgggttcgacgaagttagagctcttgacataggcccggtattcccatggaagcagctccattttcctgacgcatccatagaggttgacgttgtctgccttggcggggccatcctgcagggtgagctcatcgtaaggataaaagaggttcttcaattttgtccctgagtcgaatggagccaataaggacgtattcttatcgctgcagttgcccccgtatgtgacggttgagtttccattctgatacacaagccatagagtttcgttggccaggatcgcgtctgtttgtaccgcagggaaatagcttcgcaggacagaccaaaggccagtgaccgtgggggtggtagaagaaccagggaggtagatgtcttgtgtcagttcggagagtgtttcgaggtacaagccatccatggcgaccgggtaatgcgcacggatctcgaacatgcgcttcatgatgttacgcagtggatgggcgggattccgctggtcgtacgtgacagtgatatcattgcagccatcgcgacccttttcgatggggaaatcgtagaactttgaggtgttcaagttgaagcagccttgtgtccaccacgcggtttggtacgtcatgggttgccgaccgaacatatagttcgctgcggtagcgtcaaacacgtacatctcctgctcttctccccacaagatgagagggattccaggcagctccaatgtgatgatgtacaaacccaggaggtatttatctgtgccattttggagagctggccagcggaaattatcctggttcgagacaccatacatatgtctcggatcaacttctcctgtgaatgcattgaggaaatcgttagtgatgagcatctcattccaggcttcgatgaaatcggtaggcaaatcaaagccagcaaccaggttaccgtccatgcctaggaaacgggtcatcgaacggtaaatggtatagtgaaatgcggaggcatccaaagcttgcagcccatcgtctctcaggaacgccccatccgagctgttcgtgatcttgatacccgcgcctgcattggctgtacgctggtttggttggcggccgcggccgaggtagagactgccaaagctgtctccagatgtgatctcgccggggaggaagaaatttttcttgccgagtgcctgcgcgcattcacggtagacggccatcatctcactcaggggctcgagggtcgattgcacagacttatcgaagcggaaaccgtcgatgtctagactcgcgatttggaggcaggaatgttgagtgatcacatcgcggaccggcttgtgccattcacgtagacgatcctgcacggaggcgaacttggtaagttgacgctgccagtcggggaaattaccgaatgcctcaagctctccgtattgatcgaaatcgctgttatagcaacccttcaaattttggacgcccgaggtggttaatggatatccagtctcatcccagaacttgggatagctgcaagattcgttatagtcgttaccgaagttgaaatcggcatattctcggtcggtgacccattggacttcatattcagatgctttgaaatcggcggaatcgttcagatggcctttgaatccgatgaggttgctcattctgtgttttgatcagctcatgaacatcccaagatgcgcgaagatcagagcatgacttacgttgccagtgtgttatccaccaacacatacatctcccgtttgtgaatctcctccacggtccgcctccagtcatccagtgttccataatgcatgtcaaggagggtggtatcgaccggcgagtacccatcgtaggcccagggcaagttcatcaagtacgttccggcgaagtagatgaccttgtcggtgttagcgatggaatcattaagaggccgggtccactaaccttgaatcccattccctggatgtagtccaacgtatctatcaacccctccagatcaccaccatggcgcatctgattggagttgaccacatgctcaaaggcggtcccgttgatatcgtcattggtcgggtcgccgttggctatacggtccaaaaagattgtatatgtaggcatgcgccagttatctggcgacggatgatagtcatggtccggccatgctccccaataatcgatggggctttcggcggatttgttctcgttgagattgtatttagcgagtggtttatcgtagggccaggcaaaggcaaagacgctcaaaaacgacagtatgaggaaagctgagcgctgcatttccgtatattactgttatcagcaggaacctgctgccggaaagatgcgcgactcaaaaaacgaatggatgaatttttgacaaatagcgagagtaagatgagtgaaagaacgaggaatcaactgaaacaagcttccagcatagtgatttgaaaggttttacagaatacaatttttactaatgttgtatggcgaatacatatttttactatggagaacacatccttatcgggccgaacggatgggtggcttggactatacatagtcccgtccactacgacccaccaggtgagattttatctatccactggcttttcgccgctgcttggctgcttttcgggtccatgtctcagatagatccaggatttgagtcattatgagcaggcgaccttgggttgttgtggtctaagtgcgcccaaccaaggactttaacttgactatgtctgtagtatgtgtatattatgtctatatcgatgtcttgtacacctcagcaggagattcatgacccgaagatgggcttatgcaaagtgcaattcttagccatacagctgcatcagcacaccgcatcatcgcatcactgtatggcaaaaggcttttgatgtacctaggtccaagcacagtacttcgtattcttttgttcttttcatattgaagtgtatctatcatgcaagcaactggtaatcatcgaagcttatctttgtaattaattaaaagggtttaatccaagctattcgattctactccctatagtactccatagacacgggacgattagatattgtcaaacgaggctatcacttgatcaacctggctctaacacccccccaaaaattaatgaaaaatacaccacaatccaaatgtctgagagacatcctgtttaacccaggcattcggttacagggtggtatattggtgggtttgtttccattcggatccgcccgccttcgacgtcacatcttggctgaccggccttttcgaccactatcgccagaacgtcgccagtgtgaatcaggaaataacccactgtaagaacttggaattcctgcccgtttaatatatgtcttcctgctcttggtcctcccagcctgcttcagatgtcttcccatgctccgattaataatctcgtatcccgtgtcttagatagaaccgagcaaacccaccctcccatatgtacctaacaattcgtcaccccctcttgttaagaccccggagaaaagtcttatcccggggactctatgccactaatgcagtgacggggcgtgggcatcgtatagaatcatgatatttgcttttgccgccctcaggtacgtaaatatacgtaagcagcgttatcatccgtggatgacttgcgcggcccagacgtggttctggatgcatggcttcgacgctttcttggtcgtattgacaataggggtttgaagcttattttatctacttggtaataccaagcgaacgcaacgttctaacctctactgtatatacacccggcgatacttgatgacccgatacgaacgtaccgataagagtagcttaaatatatcgagtcttgctatatatagccgaaggcgataaagcattgattggaccatgcgacccatatgatagctgtctttgaacgcctccattcagagtggagcacggttctgttcacttaattcgaacaatctgggtgatactcccatggcctgttcagaaacgcgctagcgcctatttgatctagcctggggccgatcgtcatatagcgtgaggaaatgtcttatgtatgccacgctggagcctatacggaggatggtaaaagaggatgatcgtggcaagcccaccaacccaggcccaccctagttgggggcaccaccggatagccaattttgggcaaattttcaccgaccaagttgtagtctcctttgtgtgtgggtttgccacgatacttagccctgccattactccagttgcctccatcccattactttgccctaggcattgacctatgagcaaactcggatatccgaagttcccccattgttcggttcgcgggcttaagtcggccgttccgacaacctgatttcaaaaacgcatttcggtgaactggggcccgaggggtatcccgtattgtgccggggtttggagggatttggccaggtgaggctgacaacaggcgtgaatggcttatttaccattggctgatattgcctttcgcctgactctccgccttcctaatttatacacacgatagatctgggtacccaatctccgattcacgacaactataccccacataaccagatcttcttcgttcgcacgcacatctttctttgctcatgtatctttataatatagatgccccttacttgaacttgacgcatttcaaagacgaggttacctctcgctttgattcaagaccacacacaatactaatttttgggcacttgaaaaatctttcataaaagatattaccatggaacaatacaaggcctagacacagtccactgggtcaattgttgccttactgccggtacctgggcctggggttaaagaccaaaccccaagtcgcccgggctattccgtactcggatcaaaacacccttcgcggctagcgcggagtacaactttcgaaagcatggcgcatgagaagctctatgtagttacacaggattcttgaccagcctataggatcgtgcttgtggacagtcataatgcgaaaaccgcttcccagaacggcgaggtgcataaccgattgcatacaaggcatgatatatattgcgagaatccacaaatatcgcaacaatctatgaaaatcagatcgtggggtctacggacatatccaaattcgattagtccatggcatacacaatatgcttcatatgcgccccctccagggctaatgccgtacaacatgattggaataatataaagtcgagacatcttcttggaaatcatcatgttcagatcaaaattcagattaattcacgcggaagatggtgtctctcacatccaacatatccgagcacctgctcttggtggtgtacgtcgtacttgcctacacaggcatcaagataatctaccgcttgtatttctctccactggccggattcccgggtccacgcttggcagcagcaaccagtctctatgagttttatttcgacgttgtgagaggaggccagttcatgttcgagctggaccgtttacatgacaaatacggtcctgtcctccgcatcaatccctacgagatccacatcaaagaccccagcttctacgacactgtctatggcgggccgctaaataaaagagacagagtgcctgcgtttattcactcgggaatgccccgggcaaccttcgaggctgcgccacataatctccatcgcgagcggaggaagttattgagcccgttcctttcgacgcaatcggtgacagatctccagcctgtcatccaggagaaggtggatttgatctgcagccacctgtcgagaagggtcggtacgggggagttcctggacttgcactctatctttgcttctttcgccgtagacgtgacgtctacgtatgtgcttggccctacgaattgctataactacttgaagaacacagagatcacagacgaatggaagcaatatatcaccagcatcttcgagggcctgattcttctcagacatcttccattcctggtcaacccggcacgtgcttttcctaagattgccaccttcttctttcctaccttcttctgggctcaaagatgcgaaacggtatgtatggttattatctggaatgcaaatatactgatagaggattagaaaatagatagaactgttagggctgcgtacgaaaaaccagacgagaagtcgatgttatcgactattctctccaataagaaactgcccgacgaggaaaaagaactcgaacgcctagagcaggaactgaagtttctgatcattgccgggactgacgcgccttcccaagtgatggcactcactatgttccatctcctttggaatccagagatatgccaaaagctcaaagacgagttagatgaggctttcccggttctgtccgacgcggactggactaagttgaaatatcttccatatctggtaagcagtatcgatccgtatttttttcatggactttattaacaacgtgcaagtctgctgtattgaaagagggtctacgaatttctgccgttgtgacatcaaggcttccgcgtagtgcaccagatgaggctttgcaatacggaaaatggaccattccacctggggtatcttgtactcagtctaccaatcttgttcctggctaacacattgctctagacacctatcagcatgaccacccactccattctacgaagtcccgaagtctacaccgagccgatgaaattcatcccagaacgctggatgggtcctcccgaggaagttcgcgtactggatagatatctcgttccgttcgcgaaaggcaattcaagttgcatgggtcagaggtaagtaccttccagtctcttaaccagttccagaccagcggcactgatatatactagcatggcctactcgtggctgtacgcagtgataggtaccgttgtccgcaagttccaattggagcttcacgaaaccgacgagaagaatattcatattgttcgggactgtttcaatggacagacggtccctgggctcaatttgattaatgtgacagtcgctaaagagttcaactagaagggtctgcatgtgaattatcggtctgttttgcatcttgattagatttcattctgtcatctctcggttcaactttcccccctggcacttggaattacctgcttatgctttgtctcatagaagaatagaagggccaggaaacagacacaagactattataacacgcattagaaaaaagcccaaatcaatatataaaacccacctgacatccccaactcacattcaccagtccctagactatctatcccctagtcccaaaaacataatcccgatcaacagccagccgcccagccccaatctccctctgataatgctcgacaagcccaataacgataaaaatccagccgcgctgcccaaggtccttatcacaattcatgacgggaaacgagacatacagctcgcgccggtgatgcatggcctcgtagtgggtgatctcacagtctccagcgcggcaccggtcagccactacgtccatcaactcttcgtcggagaagaggtagtctgtgatggatagcttgactgatacccaccacaggtccgtcattgggctgaggttttcgtagtggggctgtccgtttgagaggaagattgtgcgtgtgtgctttagggctgctcggcgtcttgggcctatggggttccaggattggggtagttttgatctgaacatggcttgatggtggtggggtggagttggggtttgggttggtttggatggaccgtcgccgtggacgtgatggaactgcttcttgtctgatggtgtgtagacttggcgagggattccgaggttatttaaatgcgatgtagtgagacagtggacagttctatcgagagactgtctttgacatggttgggagagaacaaagtcttttatgtgaggttgttaacaatggctttgttggtctctgactagttaggcaggtactatgacaatgtgaaacgaacaaagcctcgaagcctttcactgcttatgattcgaaatcaaggattcaagaacaatgtcgatcagcgctctcccttaaggagcttgacattcgttagtctgacattcagttcttctaatcagagaacaatgagatttctctgatggtatcgatcagttcacactagacttagatagtatattgatgtcaaacctagtagatcatccattctccatcgttgaaagtgaaaattttatgacttttaaaaacgtctgatcttgctgggatggaagtatccagtatgcagctatgtaagtctcgacaagattacgcagtttcaaaggtcatacgtagaaattcgtcaaatctatgctttttacttgccgtttatgaaacttaggaagaagatatcaaaagaaaaaaaaatctaacagactaatcacgtcgttctcaaaatagaacgcggccgagtattcttacaatgaagaggtcgtgcaagaagaattgccgattggacattgttttccacgttgccccaggaaaaaaagagagaacagatgccaaaaggctagccacaaatacaaaggaacataaccagcatgaacagagttcattaatcgtacctggataccgcgtaggggttgatccaaataaacttcgatgcgtcattttaatgcatgttaataagccgaaacctctgccgaggtccagagcagagcctccaataccactactcaacgtagttggcagggaaaggtcccttctgtcctctcagctcgccttcccaccagtcatccgtgctatcggtcttccgcacgacgcggatgcggtcaccttcccggaaactcagatcgccattcccctggccgtcaaagtcatacagcgccgtgacaaacactggacgggatgacggcggtggtggcgggggttttttcttccctatggcggcagccatgggtgataccttggcctggaaagagtctacattggggccggcaggtgatctgaccactcctgatgaaatgggagtggcttgtggggttggcatgaatgtaggacgagggggctcgaagtagtcaccgcccgttgcgaggggcttagatcctgcggcgttttcaacgggaattgcgctgctcttgtgactgagcgttgacaggggcggagagggagggtattctggtacacagggtgtctgggccgacgatcctggtgtttgtgagcctcggcggtaagacgggagcgaggtcgatgaggcattgctaggagcgcggcttccaattgaagggcgtttcttattgtcgtgctcggctgcagctcgacgcatggccttgccaatggtcagggagccgaagttttctatttcagtttgcacaggtttgaaggcaaactcccagtcttggacaacttgttccatgtctggtggcggggaggggaatccctcttctgcacaataagtgtgaaggactgtgtaatagtttgcaagcatgcggttttggatctcgacctgtgcttcgaggaaatatggcgtcagggagaatatgagagcgattaatgttgggagtcgctgtcgtaggtcctcgtcggcagcttggtaagcctggatggcgattagtgtttcttattctatgaatagtattgggcattgagattgtacctctttcgtatcggcaagttctgcctccgctttggccaggttcgcattgtcgcggtcggtgcgctttggctttttcatgaggctatcaacacgtccttgggagatttcaaagtcggtctagaattgggatattagaactaatccaccaagaacgtcggtatttattgtgtaccttcttgtcgtttcgctttttgatcgtctttttcatcggcgcaagggattcctttgcctgcgaagccggcttggtcatgcgagtatcgacagcaccgagttcctctatgaggtcgttacgtagttcatcatattccttgcgcagtcggtttgtccgagctaatctgacggggtcggtatccacggcgttgtggttggacggggtttctgaggaaccaatgataggaccgtagaggccgtcgaattcatcaataaggcgactctggtacgttgcgatagagatccaagcatcacgccaggattgggtagattccacgatctgattaaataacacgtatcaggaaatgcgacagaacgcgcgtcatcggggtaacattgtctaccttgcctaggagcatatctgcatcgtcgaagtcttttaaaagcacagcaatttgactgtcatctgcagacgacttcgtcgtcatgcgaccaaagcgtctcgtcatgttctgcatgttgggcgatgagctctcagaagctggggaacgcggaacgggaagagaggggatgacagaagcgtgtttgaaacaagagtgaactttaattcaagtcaatattaatcaatgtattcaattcgtccacatccaatgcaaatgcaaaatgtagatgatggggaagaaacattgaaagaaaggaaggggaacgtcccatcccctcatgacacataactcagccccaatgcgtttcagcctttcatgcggctcgtgccacgacccctccaacgtatttgacctttcgggaaggagacaatgtcaatctcctgaacccttctccactctggatagatcatattaaatccggttatccatcttatctcgtcgatgcggaatactagtatatgccctacagagtacggagtacggtgaggcattatagtacttactacttgctcataaaatacagtataacatacacatattccgtacaagaggcgcagatataaacattgaactctgggaatcgacgaatccatccgtggacggacaaacttaacctgctgagctcagaactctatatctttcacgtgatccggatcttcatttatagttgccaacgtcaataaccagttaatgtaacaatgtcgtattcgtgttctcttcggtcataatccaatataaaatacggagtagtatccccgatattaggcaacgatcaatagctctttctattccgggtatggcgccctcactcccacccccatttggtcctagcctcacccgttttaacagctaaccgtgccaagcgcccaacacgcacttggcacggctaggccgctcgccctacggggtacctttaacggaccgagagaatgaaatcccacctttgctacatagaattggggttgtttaacgtgcaaggtgaatccagtcgagaataccttatctcgttgtggcatcgtataacgcccaagtctggtttccaataaggaaaatatcacctattccaatctaaggaatacaaggttgtatagcaaaagtaatccacaccaaacaattaatttccacaagtgagagtttttcctattcatccaatgagaatcaaactccaaggaaaaccacattaatcacgcattgttcaagccttcatacggtacctatacaattggcactcgaagccaatcttcttaggctcacccgaagaaagcaagtcaagaagtccgcgtttctccaggtcttggcagagttcctttttcaacagaaattcctttctattcccttcctccatgtgtcccactctgctacttccttccgcttcagttccttcgttcaagaaacgattcgtgtccaaagctagatcagagactttgccatatttgttatgccaacatttgtcgatgatatcgtcaatccgtggattgccattcaattccggaaactccatgttctgtagcaaatccacggtcttaggaccatgttcgtaggggtcctcggtaagacagcgatctccgtaaacctcaaatccgtagttgatataatagtataaagaaccgagggcgaactgctctgtccgcgagccaagggagccggaacttccacaaatgccttcatccggttcgttgctattaaggaatctgccatatggacctatacaagcttcgtgatccattccgattttcgccgtgcaatcaaagtcggataatttgagtcggtctcgatcaagtagaatattttcaggccgtagatcaccgtgagtgaggttgagagattccaggaaagcgacggcttgagcgagatcgttcatccattcctttcgtagggatagcggttccaacttttccactctagtaaccaccatattttgtcggttccaacttttccactctagtaaccaccatattttgtcggttccaagtatggttatcctgtattctagaaaatagcgacccgtctattataagtggttagaagataaacctatcagctagtgataaaggtcacacctctcatgtactcgaggaagatgcctttgtctgaaatatgaaaacattgcacgataaaggggcaaggcggattttgtgagaatatgcggtatatctcgacctctttgctgaattgttccctttcctcttctcctgactgcgggaccttgaccgcaatgcgagggtcgacctcgtaaacgaaagagatgcctcctttccagatccagtggacactagggaattggtctttgatatccatgacgaaaatataatgtgtaatttgactgtttggagagcaggacagaagcaagtgtttcctgtgattcaaggggaggtgagcagaggggaaaagcagggccaggcacagctgaaccatgaaccaatgatgatgactcccgctttccataggcccagccctgtctaattgtaatcgaggcggatgcgctggctagtgttatcgttacgaatcagaagtctggaacatccctgagctcctgccctaaatggcgtagcagcggtcatgcccttgtaaattgttgggattctatcaacacgaactaccggcatttaggcttagtacttttgatacaactttgctttctctgcgctcatgtttgcactcagcatgactgcatagatcacttatttcctttcgcccgagagaaacagtttatttaactattgaaatggaaagcgagtacaacatacgaagtatacggatataggctcagtttccaggggtttgcaatatcaagttttatacatactattcaatttacaacaatcccaccaaaacatatactatgtagacttagactttatatctacagattcaaaaaagagtataacaacagaattacagtatgagttctaggacgactgaattctgggcatatacaaacgtcttgtcgtgatgctctcaaagttccgcttcatccatcttcaacaaacctttctgccaccacttctcctcctcttccacggccgctatccgactctttgcctgccggaatccatgtccctctccatggaaaattaccaacttaggatgacgaccagcctttttcatcatttcgaccatttcctctgcttggttcataggaacgaccgtatcctggtctccttgaagcaacaacagtggcgcagtaatcttatccgctttgtaacagggactgcgttcgcggaaaatgcggtttttctcggcttcatccgcatcagaatcaaacaacaaggcgaatgcgtaatggctctcgaacttatgagtatcctcacagagcgccttgacattgccgattccatatagagaattgccaccggcaaagagattggggtagtcacaaagagcttggagtacgatgtatccgcccgcgctttggccgcgaacaccgactccgttggggtcaattcggccagacgatgccaggtatgacacacaactagcagcatctgctgtgtcgaggattcctaataactttagtcagcattggagggaatggaataatctgccatgagaagagtgaattctcaccccattgtccattcaggatatcccggtatgctctgccatatccggagctacctccgtaatttacccagacaacagcatagcctcgggaagtccagtattggtccgtgatatttaggccagttccggtttgcgatgttggtccgccatggacgcagacgatcaaaggcggcagcgctccagaaggtgcttgataatctgggttctgaggtgggtagaagatggcatgtgccactccttccaagctcttaccgtggactcttggaaaagatagatgctctggcttggaaacaagagaacttggcatggggagctcggaagctaccctgagtggagtgagcttgacggtatcggcgatgttcaatgtgaagacagtgctgaagcttgtttcactggaaccaagaagggcgatttttgtgtctgagaggggattatctgccaaaataaccgtgtccgccactggcacattcaggtcttgccaggtatcattcgacagatctatcagaatgaagctccatcgagcattcttgttgtacgacgcgatcattagagttggagtcaaacacacgtatgtgcagctgtcaaaatgtaggtcagtcatcaaaccagctgcctcctggggtcaagactcaacgtactttcctagacgccagtctggctgcgaaaattctacctcttccaggccatgcagggccacacgctggctttccagagtgtcaaagttgaaccgatagaactgccaataccccgaaacatcgctcgtgaagtacaacgtgttatcaaggccccatcgtggctggctgacactttctttcttaggcacaccatgcacatggtgaacgtctgtgacctcaccattgttccacttagcaacatacaggcgagctcctgtccaaggcatatctggatgagaccactgggtccagcatatcttgctgccatcgggggaaaactgagcagcactgtagaagtcgtcgccggaggcgacattgactatctttttggactgcacgtgtaccgcgacgagtcggttccgaacttccgccggcaagggcttggagtggtcctcttcgatcgccaagagccatcccgagtccgcctgactatctgacaaagagcctatagcagaggtgcatgcatagcggagatcagtgcctgtcgtggtaagctgttcaacaagaccggtggagggatcgagtttgtgcaaatcctgtgtctcccgatcagaaaagacgacctgtccgttgaaggcgatcatcgatgcgccgccatattcatgaactttggtgcgagcgtcatatctattggactttcattagagctgggttcatacatggctagatctagtatgtacttggccggtaagatatcgcgtccttcaaggccagagtattcaacgacgcagcctcgtccctgctctccgggtcgaccctcgatgacaaaaacctttccgttagatgtctaaaggcgccgttaaaattttgggcatgagcgaaattgaggtttattgaacataccgcgatggattcaaactgaacaccgctagcgccaagcaatgcagagctgattgggctcttccattggccgaacggagctgtgactggagtagccatggatattctagcaatagataacttattcgtcggattgatcgagttgatagtcctgttgggaaagtataatggtataggtgttgtcagcgttgtgaggcgatggtggaaaacagacagtctaccccgcatagcctgcaacatagtgaggctggctgaaagttcagctgagattcaattgaaaacgaccagtaataaataatgcaggtctctagttcaaatcttcttttaggcattcacaaatgactcttgaatacctgtctttatacctacaacatatattttccaagattgttgcctgaggcctctaaaccctaccttatcagcttatcgtttccactttcaacgcgaaacaacgcgactgaaaccacatttcgcgactccatgcgatgcgggcatgatcaaattagttattccacaatgccacaatgatgtccacaccgtcttcctccacgcgtcctcctccgacctctccgcaggtcactgcctcggtcgtgaaatttcgctgcctgtacactcacgacttacgccgcaagtccaaacgatggcacgacggacacttacgataccataaacacaacaaacgtgttatggtatacgatgaccagggtaattttatcggtgaccaccactggcgatccaccgatgaagtacaagatggcgacgaaatggagctggacaagggcgtcctgattgaggtgaccgagaacatgggcacgactgagactgatatcacaacactgtacgaaaaaaagaaatcaagccagggctcgccgccggccagagacccgcgctccccctctacctacacgccttccgcctccgtacctcttcgcggttcccagtcatttcgctcactttacgatttgctgggcattaaaaagactccgattgggcatttgatctccccgcacgaggaaaggaatcctccgcaaccagcctccagcattcaggaacccgaaagagcaccgaagcgacagaagacatcctcggtggtgaatcgaggcgagcaacgctcgcgtgtgggtgaggtgatcgatttaaccgattcaaccgattcagttcagggactctctgagagggaaaggccgaaacaaccgaaaaaaccacatagagctgggggtgattctacggctgatgcagcactcccggtaaatcgtgagcagaggtcgaaatcaactcggccacagagacccaatcctccttcgttctcaagcgcctccgcttcaactgcatctgaaccgatctccagtctaccaacaaccgaagaattattccgtacacccgccaagggtttccaacctgcaaggtcactaggcaataaatcgaaagatgacccgccacctattcaaccgccaaggccccgaggcccctccacaagttcccttcccactgtaaccccagaaactgaaataccgaggccacgggagaccttgcgcgtggagcagccatcaatcagccgcgaaaatcgatcaagagctctgtcacgtcccatcccaccacagaggtctgaccctccggcggcttcgaggagctctctcacaagcgcacccaaaccgtcgtctgctagatctacaccacagacgccggtgcgtgcagtcagcaattatgtgaaccctatcgaacctgtgtgtaatcaagcttcaatcaacgttccagcatcagtcaacattccacctccagccaatgttccacctacagtcaacataccatctccagcaaatatttcatcttcagccaacattccacttccagccaatgttttacccacagtcaacgtaccatctccagtcaacatctcatcttcaacgagcatgccgcctccatcacgtccatcatcgacactacgctctggggcacctacatcctccctacgcatgggagtcgggaagccacgcaggaaactgatgtacagtgctctattgccgggcgcttcacgaactccatcgccagcgacctcagatacatctcctggtagtgcaagtgagcccgctacaaataccccagagcaacagttagtacggtacccacccattaaccaaaattgtgatactgattctgtgcaggctggccgccgttccaggtgattcttcgatatcaaacgaagagtttatgccctcaagctcgacacaatttatcttcgacgagatgatagatggatcagggttcaaatcgccctccacaatcaaaagcctaaccgggaaaagatctctcaattcacccttgcgcaagtcgatgtccgacccgattgaatcgactacccgccaggttcgagcaggaggaccattacacgcggctaacaaggaaaacgagcccagagagcaaggcccttggacatccgaggccttggatttgtttgacttctggcctgctggacgaccaaaaccaaacgaatgaattacgtactgtggctcggtttgagagctgggcatgaggttctaagcaacaatgagtagggttcaaaccagattgacaacacaaagacaagagccttccaaggttcttgtacctcacgatgtctaccgtcttatgggaagcaatcaccaagtcgccgaaaccgttgttctcgaaaactcagtgagttttccgtagtgttcctgcgagggataactacttttcaagatgccaatcacaagtgcacaccttgcgaaaacagtgcttgcaattcgtgtcggggaaacccatgcattcatatccacagacttccttccccgcctctctccccaatccgtcagggcttatgatttagaatgcttctcttcatgaagctttatgttatctgtttgtccgaaacaagccttcgagacccagaacgacctcgatgctcttattgaaacaagggaaatatgatagaacaaagatacccatttaacattgatgaaaaataaatctatacctaacgcacaccaactcatcgaacttaaatccccttcttaaccaaaaccccagaaatataaggcatagccgaccactcaaagctcctctccaactccaccctctcccaccccccatccccatcagccgcagccctcaaaacggcttcagtatccctatccagacaacaatccccaataaaccaactccacccaagaaccccatacaaaccctgcacaacccgcccaacaaccgaccccttcgctcggcgccacgggttaacaacatgctcggtcacaagcaaccgcccaccaggcctaagcaatccatacaactcccgcacagtcctttccatctccggcacggagcacagcacacgcacgcacaggatcgtgtcgaagattcccgcgcgcgcgtcggcgtcgtacgcgtccacgacgcccgtgcctgtcgctcgcagggcggggatcagttcgcgcgctgctacgcctgtcggcacgatgtggtacttggcggagatgttctctgctaatgcttttgcgcggatcgaggagtgcaggcttttgcagggctcggcgccgtagagcgctgttattgagggtgaggttagtaggggcatttgggtgccggtgcctgggccgatgtcaagcactatccctgaggcggtgcggaggattggggggattagggctgaggagccgactggctcggggatttcttggttgtttgggtcggagctcatttggcgggaggctgttgatggtggtttggttaggagttgtgttttatgtgtctttatgtattctttataggacgttacgtcttgcggtttttctcgttcatcttgtagagatttctaagagcaagaagctcccctctgggtttgttgatgtgtggctgggactcactggtgaactcgatccagaatcttccgaatgcttcatcgcgaagtctctgggtctgggtaattggggcgaagagctggccgtttttgaagactgcttcggcgcagactcgaatgtagtctgtattgcagttagtaatgtgtaagtttatatcagatgagatattggtgctgatgtgcggagaatgtccaacaatataccagacaaatacagggagattcccaaaagaagaaaagacgatacgaaaaggaatacagcataaagtaaatacaagcagagtgcggattgagagcacatcgatcggcgtccaattccataattgatatcatagccattcggcatcagttcgacggctgtacttacgcgacatcgcccaagtaaggatatatgctggctcgaacattccgagcattcgcccgacgaacggtggggggctttcggttgacattgtagtcagagatgttcgaaacccgatttcgccaactgcaatggatgctaagaggagaaattacaagaaaaggtttatatagttagcggaaatgccccacgtgactggggagctttgtggggtcggcgataaagtcacatacttagctgactagggctgtggtctgaagatgaccaatgaatgaatgacaatggcgtgattattccgatagataattataatctcacgatcatacatcttacgagatgaaaagtaatcaggcttaatccaacaaaattgaacatagactagtatctagcatcctggattggtgcaaattgcacaagtactcaacagatgctccggaagaaagagcggtgcctatcagtacaaagacgacggcatgtagtggtcacaaggattatcacataaaaggagattataaggaaatagcagactcagattgggagaaacgttccagaacggaatgattgaacgaaggacagagacagaacagacacagtaggagaattgagatctgtagagagcaaaaaaagaaaaagatcgtatgtgagagaaagcggaggaagttaggtgaacctattcagggggtcggagcgaagagtccagaatcaccaatgagtacatgagtctcggtttgaggtatgagggattccacgctcgtgtgaaagaagttaggttggagacactattagaagggttgctggttggacaagagacaaaataaaaggagactcgtcgtcattatctttataagtgactcgagtccgggttgaggacctgcccacaaaccctacgaacaaatgccaatctcattggatgttcagcgatggtggggtgagtgcatgcggttgaccctcgggctgtaccgactggtgcgagcaagggagccaacgtcgtgttttccgtcgcaacaggcacggacattttcaagccggtcttgctcctgggtttcgatcacttgtctcagatcatcggcactttcttggccatgaagaatttcatcgttgatactgggagattgaccgtgccgtaccttcagacttgcgatggatccccgaatcgaacttgagatggtgctgagtcttgacgaagagcgttggcgatcatcgggaacttgcaacgacgagtttggcacgggtgagctgagcgccggtgatgcacggccaccgagagtcccggaagatcgcatggacatcgccgaggccgctctccgctgttgcttggatgcatgacgagcggtgcggctattgtaagatgagaacgacagtcgtgcgttctgacgagagctagaccggaagcttggggggttgaactcgttgatgtcgtcaagggatacgctgttattgtcctcacaggtgtcgttggtctcccttagaaggaggtaagacaacgcattgaaccacgtctcatgcctctggctcgttgtagccgtaaagcgaactcgtcggccaggactgacaacctccaagctcctgcagtgaagacccggaggataggggttgtcgtcggcaaccactcgaacagcctcaatgggcacactcttggtacggagctcagtctttccggcagtttgtgggtcctgcgtactccaatacagagttcgggtatacgggtgaacccagaagtatcgtcggtgccgtgttgtggacatatccgacgagccggtcttgcgagtgtatttccaaaggaattcaccaatcatggtctgagtaatcgcctggatcatgcgcggatccgtattaggtccatagccctgaggcatggggccaacctgaggggccatattgaaacgctcctcgagctcagacgcaaaagacgagactgaggatcgtcgagacatctggctttgacttcctctcctcattctggcctgggatgaaccggttcttgaagagcttgcccgcgcagcgtgttcgcttggcgtaagtgggcgctgggagttcatgcggtaggcagaggcaggtgccaaaggaggccccatgacagacgtaggggatggcggagccacgtcgatggacttcttctcggctgctgtgatagcttcccggtgatcgaagggtagtggaggatggctggcaccagatgtctgactggctgaactgtggggccggcggtaacttggcgttgttggtttcgcagcctgaatttgcgaaaggcgaggtcgcgtcggagccttgggtggtacatgtggagttgtgatacttgcagtgactgaggcaatctcccgtgagctgtccgtcacctgactgtcggaagacagcgggcgtgcggacacgcgatccatcaggatttgatctatctgtttagaggacaggatagtctgggatccttggtccatgctcactgaactaggttgctgtctaacagagcgaggtagggcgttgccagagatatcgttcaaggccagtccagcaccagcgagctgatcactattagctgtgctagggcggctacgagtagcgccaacaggctgctctccggggaccatgatagcggccccagcctttgactctgtcggctctgtttgagtagataaatctgccaccgcagggatgacaaatggcatagacttcgctggatgagtttccacagagcgcacggaggagaatgagaattccggcgtagggacaaggcggggctttggaacaataggcttcgtatatgctggatcgaggcaagagatcgtcaagttcggtacttcgcgctcacgttcaacgtgtttgataacatcgacgtattgaatgacaggtggctcgggttcaggaacagttgcttcgactggcgtagtagattgagtggtgatcgaagagaaagtcaattcgggcacctcacgctcacgctcgacgtgcttgataacatcaacgtattcaattacaggctctgctttggcgatagttgcctgcacaggggcagtggactggttgttgatggaagagaacgtcaactcaggcacttcgcgctcgcgctcaacgtgctttataacgtcgacgtattcgataatcggctccgccttggcaagtgttgcgtgtacaggcgcagtggactgagtggtgatagaagagaagcttgcctctggcacttcgcgctcacgttcaacgtgcttaatgacatcaacgtattgaatgactggcggctgcggttcgggaacagttgcttggactggctcggtggtttgagcagtgatagaggagaaggtcaattcaggcacctcaggctcacgttcgacgtacgtgacgataggctccggcacagcaagagttgcctggacagggacagtcgtttgattattaatggaagagaagcccaactcggggatctcgcgctcgcgctcgacgtgcttgattacgtcgacgtattttatgacgggttcaggctcaggaacagttgcctggattgcctggacaggtatcgttgactcagcggcgacagaagagaagctcaactctggtacttcacgctcgcgttcaacgtgcttgatcacatcaacgtacttgacaacaggctccggcacagcaagagttgcctgaacagggacagtggaatgattattaatggaagataatgtcaactcggggatctcgcgctcgcgctcgacgtatttgatgacgggttctggttccgcaacggttgcttggataggtactgtcgactgagcggcgacagacgacaagctcaattctggaacttcacgctcgcgttcaacctctttaattacatcgacgtacttgatgataggctctggcacagcaactgttgcttggacaggggaggttgattgagtggtgatggaggagaatgtcagctcgggcacctccggctcgcgttccacgtatttgataacctcgacatgcttgatgattggctcaggcacgagaaccgttggttgaatgggatgagatgtttgtgatgaaattgaagatatcgtcatctccgacacttccggtgcgggcaggacatgcttcaccggtgcggtggtgcccccggtgatgtatgcgacactcagatcaggccgtttaggtgcggaaggcgtggtctcttgggaagaaacgtgcgctatgcccatttcgggtagatcgggttgagcgttgacatcgtcctgctggtcttgaaccgaacgatcgcccacaagcatgttttgcggggtagaaacattcgatgggtcatcggatgagggcttgagtggagtcgcctttgtttcctcgccgatctcccggtctgtttgagttgcgtcgggtgcaagagcatgcggcagagcagctcctgcagcaataccgacagctccagcaacaatgctagtactgatagacgtgggctcccaaggttcagtcataacaccagaatccaccattgcgggcttaggtagtgcatccagcattgcatctgagggtctgcgtgagcccgatgcaggctccatgcggggtgtcgaagcctgggagtttacttcgtcatcatcaatgtcctcgagctctccaagttcggcaaagaggctctggccctcttgagctaatggcagtggcgcaaagctgggtgctgcggattcgcgtgaactcgaaggtcgactggttgatgcgaatgtggcctctccagatggacgaatacgtctcacgctacgtttagacttaacacggggtctggaggcattcctctggctcggagagtcgaacactttatcatactcttcctcatcggaagatgcggaagcagtgctgttatatgagttgcggttgcgagctttggccaggagcaggggagaaggcactcggcggcgaggagtggtctgtacgttttctgtctcggtaagatctgccgaatcgctgctgtcatccgccatgctttcgacaccagtctggaatgcttcgctctcagttgcggttgccacctcattcgctgtttcaaatccatcttccgcctcggtggctgtatggtagacgtcgctaggttcatcaggagactgcgagcgagagcggcccctagtggataacgccttggtgtgggtctcggtaggactgatttggcccgcattgtcttcccaatcggtgtcattaagctcaacaactgatttctctttgcggcctgcgcccaaaagatctgggcggggaggctttcgggacggctccgtcttcgtcttctggcgtttgctggttgcgtttaccgtagtgctctcacggcggcgttgctcaacttcatcccgagcctcttgcagcatgcgcttgagctcaatcttttcggtcttctcgcgatgaattgtgctcttaagactctggatcatgcgatgagcatggccgagcgagctcttcaatgtttccgattcaagatggccatggcgaggggtgaacttgttgggggacggtggcggagagctttcaggtgtgatctgctcgggctcattgtcctcgtcgtcatatgcaatatccctcgagttctggttttcatagtctcggagcctcatggcaacggccttggcgagttcttgattttgagaagtcatttctaagagcttcttttggagcgcggccttttccgcatcgccagaagtcaggttcctccgcaagaggtggatttccgcatcatttgccttctgcgtgaggatttgatcctcaagcagcctcgcattggtctgccttagctcctccagctctcgttccgcggcgttcttttccgaattcgacaatgtgatggtagtgttgagccgttgttcacgttccgcggcctcccttgcagctgccataaactcatgtgcttgagtctccagcgcccagttctcgtccttgtagcgttgctcactgtcgtcgagcgcccggatcctttgttcataaccctctgcctccaactcaagtctggacttttccaaattgacaaacttgagtgtctcatctcgttctgcgagaagagcttgcagttggcggacctgggccaaaagtgaagtggagatctcagtcgcaaattcgatatcgtggacacggttcgacggttgattgcgctgcttgcgggatggaacgctgactttgctaggggagtttgtggcttgactggcgaacaaagcggaatttaagggtgactatcagaactcgatgttagttcggttagagttagatgtaaacccaggcagtaccttttgatcgaaagatagcgttccaagttgagcatcctccgggcctccggcaagacgtttgggtcctaaaaacgctcgtgctgactccaagccgatctcattgtactccttttccaaatctgccagtttgcgtcgcagttccgggcccatctctccctcattctgctcctgctcaacctccttcaactgctccgagagctgccgttgctgatcgataagggccgttcctagccttgaggcctcctccagacggcgctccgtctccgccaagtgggcctcgagggcccgtttagcttgtgctggtgaagacgcattcaggctgtataactgactgtcaaagggcgagtatcgattggagtcgcgacgagcagttggccttccggaattcgcaacgaaggggtcgtccatggacgcaaatggcccgatggcctcagcgttggatgtggtcattatgtgggaatcaggggcctcgaacggcatctgaatcctcttaatgccgaggacacagttgccgttgagatatcagggactcgcggcttgatcgttgttatgattctaggccgcgggcattatccgaatcgccgcactctgtcaaagttgtcgcaagacgctttccgtggaggtctctgccgagccgaccagcgaccaaaggttgttcagggattcgggattaacacgctgatgttgatgcgatagtcgtcaaacggtacgctgttgaaagatgtggaagggaagaggggggaagcccacacgattaaaaataacaaacaccgaccttcggacgaatcagtgagctcccagtgagattggccagatacacgcgcgcagagatgcaactaaccacaacaaagtgctcgggatctgcaggacctttggaatgggccccggtctgaataaacgaaagactaagagacaaagggaaaacagaaggatagctacctaaaaaatgaagggaaaagaaggaaagggagcgtagggagtgatttgacaggtcgagtttggatgactcggcgggggagaaaagggaagagagtacggagtagagtgaacgtggtattgttatttgccaattattggcgccggcgtttgagattcacgatcgatgatcaccccatacggagagatcaatctacgatactaggctatcttgttttccctgaagggacctttggaatttactatgaaactgtaaaaacatatgaaacgctgattcgacaggttcctgcgtgtgtttggctgccattttgctatcaaacgcgtcccaaagtaaggggggtgtttgtcttgtttgcatcggtgtgcttagtcatttcatcgcctcgactttggaaatgcgccgcatctttacaacctttgcatctgacacgattgcttgatatactcgactgaccttcaccaatatacaacacacgatgggcgaagagacagaagtcgcagacgctgtcccccaagtcgctttcaagaaacgctccaagggcaaagccaactttcgcaagaagcccgccacgccacctccagcttccgactccgattccgactttatatcatcagatgacgaagaagggcggcgaatcaagaggcgacgcaagaatgcagctgtcaccgcatcatcgacaaatgcgacaaggaaacagcacacagacggacctacagcagcggttccggctccattaacctcgagcaacgatgccaccaaagcttccgactggtacgatgagaacttgagcgagaagaacctattgggcacaacccgggcaaaaccagccccctctacctcacagctagacggaagctacaagggcgccgccaactatcaatctttcatccagaagaaccccgatgcaccggggaaattcggtcctgtcaaagctgcgaccaatgttaggactattacagtcacggattatgcccccgatgtgtgcaaggattggaaacaaactggctacgtgagtcaccctcgcctgtatctatatgaatcgagactaaccatttgaattcagtgtggctttggagacagttgtaaatatctccattctcgcgaggcatacaaggcaggatgggaactggatcgagactgggaagtcaacaccaagggcaagcaattaaccgggcgagtgatttcccagcgaaaaggtgcgggcaaaatcgacgcagaagatgatgaagatgatgaggatgaattgctagagagcatcccattcgcctgcctcatctgcgtgaagccttatcaagaacctatcatcaccaaatgtgggcactacttctgtgaagcctgtgccctacagcggtaccggaagactccctcgtgtgctgcgtgcggcgaggggactggaggtgtctttaacgttgcaaaaaagttgaatactctgctgaacaaaaagcgagaacgtgcgcgcaggattcgagaagaggcgattgcaaagggggaggaggtcagcgatgaagagggtgatgatagtgattagtctctgtatagcataatattaacacaaaagcagctggactgccaccttctcattgcatattctattacaacgcaactggaaaaccagttgatcgtaataatgcgtcgtaacatctctccgtccatgcatatcatttctggggctaatgtggcaaaagtggaggtcaaggtatatagtgtatgttgtaccatgtacagtactgtgtgccaaggcttcaccattcatcatagagacagtacgacaatacgctggtcaacgtaatcaaggaataatgccgaccacgcggcatgcgacgcaaccctaacgcggacatattccgtagttccacggcaataaaaccgcgggccttttgaatggctcacgttccccgctaagttgagacttgccagtgccaagtgcagtctagttatggtgcgatacaatactccgtacatacaatcacttgcattccatcagatgcccctcgggatattccttcccattttacatgatctcactacattgcggagtatccatctctgatctcagaggtcttacaagccatattgcaatccacttgatcaagatgtgggccgtcacagccacagaaataagaacccgcatattagggccctgaatctttcagggtccattaatatatgacggtattattcaagattaatattattcgactatattcgactaattcgactatgcttccatgttccccaagtaggctgtgcatcgacaaaaaggatcaatggagccgaccactaaaggttattctggccaatttaaaatcgactgcaaccgagccccactgtcttagtctgtaagtaataatagtctgggcgccttagttccttagtatacggtctatgcccaaactggaaaaagcctgctaaatcgtcgacgccacgtgctcttccggacagaaaaacgcgttatcagggtggatgcagagggtgcaataataccgagaatggaaatgtgtacggagattcgtaagatcaactgttaagcctttcgttccgtccatggctcaagcgtaaactcgtcaaaaaggggttaagcgtaggtccaagccaagctttttggtttctccccaaacgaccaaaaaccgaaaccaaaaacccaaacgccccttggcatcagactaaaggcggctcaggggagtcaaacgccccccggtggccaatgatatggccatgacatctaaacggggtaagtccaaggagaagctcccctcttcggttctatttgactttaaatcttttcctttttgtacggggtaatctttcgtttccatttcatctgccttgactagtccccttctctttcctttattattccgcgccttcattttggatcatttttgccttcaggggtggtatttcggaataatcactccttctactccttctactccttctactcctatttcgcatcattatcatacatcgggtacatatcaatggcttagtagtgaatcctctacctcaagtcacacttactacctctccacagagggacttttaatatcttcattcattatgaaaggcggattccgtatcgcggggttttgcgttacctgcctcattctattctcaatatatctactcgaagcgcatctacaagacatctgcaatcaatatcgcgctggcgcatatgtgattcgttggctagatcgccatggcactgccccaagcccacatggcgagatcacaccgggtgataaagtgattgtgatggccaagctggaagaagagaacaccgattgggtgaaagacgagcttcctgagtgagtgcttcgatttcgcacttcgaagacccaactaattggcttgctttccaaacagctggcaacgggcaatctacactgtcaacccctcacacgagacacggctaaatcctgatgttctgacaactccattcaacaaaggccatgaagccatggcctacttcacgtacataatcgactcctaccacaatctcccctcgaccatcgcctttctccacgctcatcgcgcaggcttcctcatggcatggcacgtcgatgcgccactccacgataacgtcatagccatgcgcagtctccggtccgatttcgtccagcaaaacggctatgtcaaccttcgctgcaattggaatcccggctgcagggacgcccatcgcttcaatagtcatgtcaccgaccaggtctggttggatgtcttcgacggcacgagtacgccgcccttgaatacttcctcgtccacgcagcaggagttcgccggccagatgtatcttcgcaagccggccaagatcggtgccgcatgctgcgcgcaattcgctgtctcgcgaaatcaggttcagaggcgtccgattgaggattatatcaagttccggcaatggattatcgacacggagcttactgacgcttcgtcggggcgggttatggagttcttgtggcatataattttcggcatgcaaggggtatagtaagttatggctggtcacattttgttataatgttgaactaacgtcttttgcagttgtcccgatgaagaattatgttattgtcaagtctacggacagtgttgattccggtcttggcttgagcattgacacctcccggaatgggatctacatatcgtggaccacgtggcgttgcacgtggcattaccttctccctaccacatcccttttacgacagtacaaacacccgctcacttgaattcggccatacatcttgtcgcatagaacttggagttttcagaagtgcttttcttatatattaattgcgttcaagcgtggaggataaggttccttatgcacatactctatcacttttaatgatggacttgaaaatcagagtacataaaatatatattcttaccattgtcttcttcatttccttgcatacatctcatccatccagactttatggcctttactaccaaagtgacttcatgctctaatatctctgcaaataacaagacactaattaccagagacagtccgaatacactgctttagatatccacccaccctctgcacgtcatcaagacaagcaacaacaccaacataaccatcaggtctaaccaccaccaatgcaccgtgtgccggatccacaccatagatactatacgcattatccaaagccgacccatcatagaaacgcatctcagcctgctgctttacacacgccggcacatccttccactcaaaagaccgatgcagccggggatgcaaaataatcagctcaacagtcgatttcggaaactgcgcttcaagcagagcgacttcttccaatgtctgtacagaaacacttctccgatcaagaaggtccgttgatgtaagacatagaatgcggaatcggccagtagaggggatatctgcggtgttatctgttagatatcatataatatcaaattccgaccacaaactccgagtcccagcgcattggcataccatcatggatatcccgctgccacccatcagcatgccgcagcaatcggacattaagcaatctccggcccggtctcaggatgccggatatgtattccgttccttggatggggtttgaacgcctgccctcaacaccattgtctagctcgtctcggataactagcatattctccgggtattccacgccacacccactcgtaaagccatttccgagcttgaaagcctgttggaattcttcttgtgtcagtccttcggttgcgcccatttgccctgagaacatggtggagaacttccggtcgaagtcgatgagctgttgggctatttcgtgccgttctgtctggtatgtctcgagtaacggggttgggctgggaccgcttggttctggtgcaagcccgttaatgtggtatataagcttccaggctaggttgtaggagtccatcattgagacgttcatgccttggccagcctggtggatggaagttagtgattttgatgtgctcgaggaagagttgctgggagacttactttcggactatgtgtatggcaggctatacatgtgcttctgttagttcgatgctatgcactctcttcggggcaaacttaccgtctccaacaatgaaaacccgtgcaacccccttcgaatcattgacgataaactcgggcgagacacgctggccaatttgatacgcagcccaccagtcgacagcatcctccttagcacagagagagtacggcttgatcgcatcagcagcttgtttcagaatcccctcgagggtaatcttacttctccgctgtcgagcatccccagacttaccatcctctcctccatccagcatctgatccccctcttccacaacccccggaacctgaacatacaacctcgtgagatattcaccggtcgaaattctctctctaggaataaccataacagaaccagctggagaatgaatcgcacaccgacggcgaatatccgggaaatccgtctcaacaaccacatcaaccacaccccagatatgatccaacgactccccctccagcgacagccccatacaccgccgcacaaccgaatgcgccccatccgcaccaacaacatgcttcgcgcgcaccgtcttcccaacccgaacaccatttacgatcgtcaccatactaacccgcacagggaactccgcgtccccatcctcatcaatcccaacatccacaacctccgtattccttaaaatcccacgctcagaatacctcatcaaatccgtttccatgatacgctcgacacgtccctggtggatggtagcctcgtagcggaaccgcgctggcgggataatctccggcacgacggatgtgcgctcgatcactttctctggatcggatgacgggttccagaatgcgaattgccacatttggcacgcttcgttctcgatttcggtggagagaccgagggttttgaggacttctagtgtgcgtggctgtaggccgtctgcttggccggttttttgagtgcttggttttgtgtctatgctgaggagggaggtggaggttaggccgtagcgggagaggaggagtgttagcattaggcctgctggtccggcctgtgtttctatattagggatttgtttttgtttggatgctggatgttggatgctgtgttggtatctggggtattgtattggagagcacatacgccaaccacgactacttcatatttctcttcgtctttatcatcgcgcttgaatgggggtgctagtcggggtagtggtggtgcaaatgatggtaggactctcaagtcccgagatgaggaggaatgctcagtaaagaccggcattgctttttgggtgctagaagcagatcgttcgagaatctttagttattggaagggagaaaatggatagttatactcataaatcgggtttgatttagttggcctgttttgcctgttcttatggggtagccccgcgattctcttcgagtgggggatctttatatccgcgatttgcgcaacaactactccatacgcttgttttgattggatcaagctggcagatagtttattttgagaattcgtcggtaggagagggtggcagtttggatatatgtacagcagtagccatttggttacataggtataccattcggaatatctcatacgtccgcgaataagagcatataaacggcctttctttcgtgggaccatgtatgtgtctagtgagatgctcttttttggagaatgtcttgttgcatgtatggcatctttggtcatttaacgaagacctggatataacgaatatttactcgtgtctcaattgattcattttaaataagttttactgtagtatgtactccgtaggtgttgatcatcaagtccggaattcccccatttccccacagtacgtaccccacatccatttcgtgcatcaaatctatggttcttggtgaaaggctatgctttcattagttaattactagaagtattttgcagcaccttggataaaaatattgatctttcgaaatagctctggccataagtaaacaggaagtaagatcataactcattaatcgcgcccaaatcgcagcaaccctggatcccaccaagatgatcctaagcaaattggatcagtgtttaaagcttttgctcaaaatactgctcaactcgctctacaagatctgctttcttccctgctgtggcacgcccatgcgaatgcaagaactccttcagcacgaccatcgtaagctgaacgaggtattagtttggtcaattacccgagaggattcgaatgctcaccttggaaacagtgcctttgtcaaagcacttttttacttcatcttccactccaggggcgctgtcttcaatcttaactcgctttggtgggtggtcgctagcaggctcggtcttcgcacctcgctttaccagcgtggaggtggctgctgagccgtcaaacatctcggaggcctgcaagttaagttcctccgcccatttaagaatatagtcgccagcgcgctgtggtgaagcatacattcggtcagtgcatttccgcaatttctaagagcatggaagcagcaaccttatgaacctgtcggtacttgggcacagtcttatcatctggtgattctgggaaatcttcgtccaaggcgatagcctgtaagatacgatagtgccattgaagcgctgcaacttggtcagatcatttccaacaaatcacagtaatgaggctcacaagggttcggatattttgaagggtcgtatatagccttgggaagctgcaattggcgaataacatcccgcatggcattattcaatgcgtcccctgctcggttaatcttactatctggattttggcgcacatcatctgcgaaaggaagcgcgataatccacatcccaggtggaattttctgcacgccattctcgtcgatcttttcagctccagcaatcatagcagctaagaccggtgaggcatttctgcgggggataaaccaaaccaaagccagtttctcggaatcgagaagtttctggtgcaatgcagaaaagacccgtgtggagccaatgtaaccctcttcggagggatagataaatgaggggtgtttgacattggcccagaacggcagggctgacaagggcttgaacccaataatacggatcacagggtcaccgaagttccttagcgcctgttgttcttcaatgctgaatgaaacctgctcaccgccgaacttgtatgcctttcgaatgctagacttatcgatctcctgtccggtctcgtcggacattagagttgtgacaccttgagcaatctgagcagtctcgcccccttgccatatgaagcaactcctggcaggctcttgctttttgagcagcaaatatccattgacggatatcttgaaatcaggtccgatctcaagtggcacatttgagaacagcgatcggcggggtacggatctcgagttgatgctagacaatagagaattaagcaatgtgagtccgtcacctttaccagtcgatgcgttggtgtccggctgtaggtatgccggggcatcaccatcactgggcgatgttttgtagatgatgtcctgctgattgtgagtataccgctatacaattaggctaataacctacatcgtagaatttagaggtgtcgaattcgtgatctgattgagagatgggaaacaactcgatattgacaccaagatcgtacaagtcccttgcgcgaactgttgcggcggaccgcattgccttattgtctgcgtggggattatcgttgtcagtcacgacaaacagtcgtcgagatgagaagtttggagccttcgaggtaaagatctggtttgcgcagaacagcatattggccattgaaactggctccttcgatggttccaagatctgccgtacgtcatcgtcaccatctgctggagatgtgagggaccgtaagtgcttgacttcctgggctgatggaacatcaagatccgtgtacagataacagtggggatatgacagatcttcttggtcgtcctcattttcatcatagaacttggataatttcgttccgtagagcagaacgccaatcatatcatgagggttggagacgatgcgctgttgcatcagatggtatgcacacttcaaggctgcagacgcgggtgattcgtcgccatgtttcttaggatcaggtgatggacgaggcgtgagcatcgagctgctgatgtctatggcaaacagcaccgcatctttgactgatttgaagctctatgtaggcaacagtcaacatcggtaactatatctccggcttttgatactcacggtctggtcgagctcttcgtcctcgtaattatcctcctcgcgcgtgtagtaatcttcagccatggttgttacaaatatgagcttgacagattggaaagatcaaaaggtgtaaattaatcaaatctaaaatatcatcgagacgcgctctctgacgcggacaacacgaaagtcaggtgacgctgatgcctgaagctgctgacattctccgacggtgattggccacggccggtgggcggcgaaagctacataaccaaaaccggattcaacaaatccgaggtccaacataagctggaattgtcaattcctcctcaattaataccttcagactactttcttttgtctattccaaaatataattcatccccccaaaaccatggcattccgcagccttttcgcgatcccccgacagttattgactgagaccacatctctcggaggtcggtcggcatttagcagtcagctcagatgcaatcaacgaggtctcgcaacggtggtaccgccagtcacacaaaatgcgacaggttccaagggcccgacagctattgtttttatgaacatgggtggaccttctacaacggacgaggtggaggactttttgagcagactatttgtacgagtcataaatggctacattggccacgttgaattgatatgctaacacatgaactacaggctgacggtgatttgattcccctgggacgactccaatcgtatatcggccccctcatcgcacgtcggagaacctcgaagattcaaaagcagtacgcaagtatcggcggcggatcgcccattcggaaatggtccgagtatcaatgcgcagaaatgtgcaagttattggataagatctccccggagaccgcgccgcataaaccttatgtcgccttccgctacgctgccccattgaccgagaccatgtataagcagcttttcgccgatgggtttggcaatggcaagggaggacgtgctgtcgcgtttacacagtacccgcagtactcctgctcaacgaccggcagttcccttaacgagctgtggaagtggcgtaatcgtctcgagggaaagcgccctaatggagggtccgagccagctggcgcaatccagtggagtgtcattgaccgttggccttctcactctggtcttgtggaggcgttcgcacaaaatatcgaggctcaactcaagacatacccagaggagaagcgagaccaggtcgtgttgctgttctcggcccacagcttgcctatgagcgttgtcaaccgaggtaggctatgtccccgattactctctagaattacactaattattctctcacacaggtgatacctacccggccgaagttgcagcgacagttcatgccgttatgcaacgactcaagttcaagaacccataccgcctgtgctggcaatcacaggtcggacctagtgcgtggctcggggctcagacagctgataccgttcaagagtatgtgaaacgaggacagacggacttgatcctgattcccattgcgtttacaagcgaccacatcgagacactgtttgagctggatcaggaagtcatccatgatgccaacaacccgggtgtcaagcgcgcggagagcttgaatggaaacccggttttcatccaggcacttgccgatattgcccgcgaccacttgcaaaagggagaattgtgttctacccagatgacactgcgttgccagggctgcaccagcgagcggtgcttgggtcagaagaaattctttgccggccaggaacatgcttctatggtggtctaaccttggaagcaactaagcttacatgagtttttgtttggactagggaagtccaaccttgtatgtatacggactacgaggcgttggaggcgttgtaagagtataaaatttcggggataatgtactgtacgatatatattttcaattcttgcagggcatcttacgatatacaaaggccgtcagaatgacaccttaatatgactacatgtgcaagcccaattgcggagattccggagctaagagctgccaatgatgaaatcccgataagaattcaaggaatccaactaacattcccccctctttcgtatgagggtgatgatgtgtcgtgtctctaaatcttacaaatcaatttgttagcggtaatcttacaaagttggaatcctgcgaaatcccgaaatcaccgccaatgtcccaacttcatcatggagaacgaagaactctttgtgggggatcccgatattgcggagctgcacacagctcgagagactcgtccgattgaacatgtaaccgaaaacacgcctctaattgatgaagccgatgggctgcatcgacggtcttttgaccttacgaataatcggccgaaagggaggagagcgagtgtgagtgactgatttacgaccaaagcgtcggaaacaactgtctaatctgcaaacatgacagatttggtggctgctcccatttggtgtcctttttaccctgggttttggtggaatggctgtgcccaagatcaatttggtcatgtcgctcatctgccgagattatctcgccgagaagaccacccaagaccccggattcacctatctccctgttatatttggggataataatccacagtgccagataccgcaagttcagtcgttggttgctcagttccagctctatctcaatcttattgcgggtattctatcagccttagtgagtccccggttcgggcacttatccgatcgctacgggagaaccaaaatgatcgcgctgggcgcgatgggcgcggtactcaatgaggttatcactgtcattgtggctaaatggccagagcgggtctcggtcaatatgcttctagttggagcagtcatggatggactgggtggatcatttacaaccgcacaggctttgatccattcctatgcctctgactgcacgcccactgaaaaacgaagcgtggcattcggtctcttccacggtgctttgttctttggaattgcagctggaccaggcggtgccgcatttttgatcaagcatggaggcacgctacccgtcttctacattgcgcttgcattccatgcaactttctgtctatcggtcttcttcatcgtgcctgaatctttgtccaaggaacgacagctcgcggcccgcgagaagcatcgcttgaaaattgtggatactgactctcctaaatggtactcttggcgtgtctggaacccagtgaacttgttcactccgctttcaattctgatgcccgccgttggaaagccgagtgccttgttccccaaccgccgcggtgccagtccggctctacgccggaatatcattctgctggctgctatcgatactgctgtctttggagtcgccctgggcacggtacaggttatcatcatctacgccgaatacatgttcaactggggcagcgtggagtccagtctgtttgtagcgaccgttaatgtggtgcgagtgatcaatcttttcctggtgcttccgcttatatccatgttcttccgcaccccgtgcgtggaagacggaaacattcgcggctcggacatgctggacattgttctaatccgcacatctataatattcgatattttgggctacattggctatgctctgtccaagacaccatcaatcatggtgatttctggtgtcgtcgcctcgctaggtggcatgggttctgcaattctgcagtcatctctgaccaagcatgtgccgcatgaacgcattggacagatgctcggcgccactggtcttttgcatgctcttgctcgagttgttgcacctactgtatttaacttaatctatagtctgacggttgcaacattacctcaggtagtgtttgtggcccttgcggctgtttttggtgtagcattcctcatgagtctgctaatcaggtcgcatggtatgtttattctcccgatctcctacaagaagtatactaattactgtgacagttaccctggaggctggtccccctactgatctaagattggaagaagatgccgacgagcatgacgggcttttgcggtaatggatggttctttctttgatacaataagctgtgcttccttctaaatgttatatgtctgcttcgtagcgtcttttttgatgttctatatgattgattgaaatagaccggtctttcttattctactttgcaactctcatggatacatgactatgtaactagctgttggttatttcgtaatgaagatgctcgatgcatgctcggcagactagagccattggagaaacacacatatatcgatagacctggagtaggcatagaatatgcagcccaactttctttatcatatatccctttcctcctgatttttatatcttataggtcgacgtgaagtcatggaagttgtatgcggttagatccatgggtcgtatgacaggccggcctccggtctccggcaaccggcactggcctaacgcgcaagttgatttgcatcgggaaaaaagatgttactccgaccttaccctacgctctccgcttcaattgcctgtacacctaattttggaccatagctggtggttgaaactatttaaatctcctttgtttcagtcctctgctcgtttcggaacatcggtgcaaggccgctcatgtacgactggtgaacccgcgcgcaacccgcgctcaacatctgcaatatgcttgcccgcgccgcaaaaggcggctcgataataccttctcccaatgccctccgggtactccgccaattggctctggccggctcaacagttggcggattctgcaccgtcgcagccctcacgtacgaagcccatcgccgggtccgcatggccgagaaaatcatcgagaataaacgaacactacacagcagtgcgccgaattacgatgcaacatctgccgccaaacgactaaaggtgatggtcgaggcagcagaggcgggcgaattcatgggcattgaatccctcaaggcgaggaatcggaacgtacctgatgagccagggttcgagacagaagaccttgagcccaagcccaagcccaagcccctggtcagcttggaaaaacaccatgctcgctcaaaacgttcgctctttgggagccagtcaattgcacaatccaattacacaggaaacatcgattctccgggtttagcccagaacgctgaaattctggctcgggagaaacaacagggcgaacttgcacgagaatctggcaagctgccctttgacgccgaaattcgcaggttgttaactgaggagcgggaaatcactgctgcgaatttgttcttagcgcacactcggcagacacctaacatctcttgggaacgcagagagcttgcatgtgttatattcaccgccaactgcatcaaaggaaacctattcgttgctcgaactttattcaatcgcctggacaaagtcagtgtcgtctcggcggagatgtgggctacactgatgcatctccttgcgaaagaggggcatattgactctgtcggcgttatatatgataaattcaaaactagctttgctgttccaaaccatctgttggaggtcatcctgcgatgtctgatcgagtccaaacggttggactcggccaagttcctcttcttccagcgcttcgaggatgaccgtgactgtggcctgtgtggtgcttatcttgatggattatggcggaagaccaggagcatggaattgctgtcttcccaactcggcctcattctcaaacgcctcgaatcactcgatcgaagaccaaccgagaaacttttcaacccaatggtcaaggccatggttgaaactggccgagctgaagaagctgaagctatggtcaaggctatgccaacacactacgggactgagcctggatgccggaccattggcttgattatctacaacagagcacttaactgtgaatgggacagggtcatggatggcatgcatgctatgcacgagcatggatacacccaatcaaagaaggatttcactatgattttcgaccgtgtcttcttggaatactaccccacccacacgggccagcaaattctcgacttcgtcatctcttgtatcaacgattttgacatacaacccgacaaggtactccaccgacacattctcgaagcgatcattgaaaagggcaacgaagatatgatcgcactcattatggaaatggccgaggaacagaattggaatactggtattgacgaacggtttatcaagtcactcctgaagagccgaaaactcgcaatgaccgacaaccctgtgggcatctggcgactgaagcaagccgccaagaatcgacaagattatttaacttcttccaggcgcatccttgggactagttctgacacttgggccgtacggggtgagaaaattgccccgattcacattcccgccgaggaaactttccctcaaacggtcagcgagatggtggcatccaaaaatgctagtctatatgttccgctccacaaacggatggagcactttatcaacatgggcagacacaccgatgccctggccatttaccatcacgcatccactggcggtttcgtagtcaggccacttcatctgaagctggctgtgatcgccgcgattctcagttgcaaaaagacaggcttggcgaacgcgcgacgtctaattacatctgaatgggattactggaagaatatgccttctctccggcatagtaagcgttttacttcgtggattcccatcttcttccaacgggtcatggaggtagacccagaagccattgggtatggaggcttgatcaaaatggccatttttgaatattacgatgtttgtgccaacaccaagggtcttttggtgaagcacttttgtgctacgtcttccagccgttacctcattgggggtggaacgccagaccttgccgtcgatctcctcacaacaatctatcaatctcggtggcggatctctcatggcttcgaccaggtactattgaagatgttgctgcgtgggtttgccaaggtccataactttaagggggtctggtggtgcataatgacagtcctctcgcggaatgagcctctcaatcaagactttgtcgtggaagccacctctcagctgggccccctagaaagtgcgatcagatccgatggctcctacgatgctgcggggcaagttttggtactccggcagatcgtgggggcactggaggccaaacttgaaggtgattcgcattggtcaaccattaatgttcacccggagttgaaaaggttgaagcgttccaagccattcaaactcactgagcaacaacatctcctgcccaccacagacctaggggagctcatcatgaactttgacgaagagtgggagttggatctgttgcttaagcgcaagcagttcgacgctcctgatcatgcaaagtggtgggctgagtccaacgtcacaaactcgaataccgtgccttcagaagatcccgagtacccgtggaacaatccagcgcattggggtgcgcattacgtgccggagaagtactcgtccgactatcacctggagttttcacttggaggggaatacgatgagtatatggagtatgaagattatcaggggcaccgggcgtcccaatgaacatgtataatagtgtaaatagtatatgtacaatagccatcctcaatagattcataaatatatgcctgtataccgtcgtatatccaaatcagtccactcggagcgattactaccgtggtgtctccttctgcgtagaattggaaaggcggagagaggtcatccagtgaggctttcacatgtcacgccaccacccacccctttctcaaacatcagcccataaacacaggccaatcgactttcctttaaatcaattgcctaggccgataatggtcctgcctcagtcgactccgttctgacattatctactcttccaaacccaaaatggcatccgtgctcaaagacgacgcttccctctccacggccgctcaacgccgcatcgacaaccacgaagctgatgttgtaatcgtcggcgctggagtcctgggctgtgcgcttgctgtcgcactgggaaaacaagggcgcagtgtgatcctgctggaaaaatcgttggaggagcccaaccgcattgtcggtgaactactccagccgggaggtgttcaggcgctcgagcaactagggctacgggattgtctggacgatattgatggcattgatgtgaaaggatactgggtttcatactttggcgagccggtgctcctcgaataccccaagtctagcccaacctcgcctacaccgttaggacgagctttccatcatggtcggttcgtgatgaaactacgggcagccgctttgtcttgtcccaatgtcacagtggttgaaaccaaggtgactggcctcatcatatcgccagataccgaggaagtccgtggagttgagtgtatgaccaaggatgtcaaagatagctacctcggccaactcacggtggccgccgacggctacaactcggatttccgcaagcaacaccaccaatacacacccacgcggcgatcaaagttctatggcttggagctcattgatgcgaaactccccgcgcctaacactggtcatgtcctcctcagcgataacccacccgtgctcatgtaccagatcggcactcacgagacccgaatccttatcgatatccccgataactttcctctggcctcgctgcagaacggtggtgtcaagggctacatgcgaaacaacatcctgcctcagctcccagagggtgcccagaagccgttctccgacgcgctagagcagggccagttacggtcaatgccgaactccttcctgcctgccgcggtaaacaagacacccggcttgatgattctgggagatgcgctcaacatgcggcaccctctcacgggtggaggcatgacggtggcgctcaacgatgtctgtctcatccgcgaattgctcagcccagagcgcgcgcccgacctctccaatacaggccttgtcctcgaacagctcgcggaattccactggagacgaaagtcttcttcttcagtcatcaatatcctcgcgcaggctctctatgcgctcttcgctgcagacagtatgtattctgactctttggttaattccagtaactaattgtttctatagatcaatacctccgagctcttcagcgtggctgtttccgctacttccaggttggaccagtaggcggccccgttgggctgttggccggtctgatcaagaaacctctggtccttgtcagccacttcttctccgtcgccttcctctccatctgggttctcctctgtgatacccctccgctcaagctaatcctagccccctactacgccttcatgatattgtacacagcctctgtcgtgattttcccatacatctggaccgagatctggtactgatctggcttggattcatcaattggtgttctactttcctcaaaagcgacaatgggggtactatcgtaacctgtggaatatatcgtcgatattacccgccaagtctttgtttaatatcccatcttcaccctgtgtcttttcttccacgccttatgtcatttaatcttgtccagcattttcccactgcatctgatacattgcaggatttgtgttacagatttactgtactatatactatatgtcataccattatttcaatgatagatgatacgatgtcaatatatccggaacattccaataatcaacgctttctatgctacataaacatacaaagaaaagaaccccaaccgattcacaagattcacaccctccatagcccacctcccttacttccgatgcccatacaccaggaaacaccaaacccaaacctaaccctcacaacaacttcacacaaagcgaatatgccaaaaccccaaaacaaaacgaaaacgaaaacgcaaagaagttaggtgcaacaggcacaggggtctggtccacacgcccaaaccaaggcagcgcaccaacgccaggcagctggagacccgaccaattccaatcccaggaaagaaaagacatgacggcactggctgagcggatggcgcaattatgtacgaaggagatgctggaatacacctcgcagattaggctgtaggcgagaaaaaagcaatagtataaatacagcattaaggaaatgaatatcatccacatctttttgttttcttttactttttctttttcctttctcttttttaggtgggattgctgttgggttgggatgtgtcctttaggtatgtatgtgtgtatgcaagcggattcttggtgtttgtggtttatcgtggattgtagagcggatgggttgctctgcacggtgttgttcttgtgggtccaggtaggagagaacgaggatgagcacgacgaagggaagagagagagagaggatctgagaattgaatctaagaggctagactttccatttcctccctttgttctctaggtctttgttattcgcagcccggtctcccatttacagacactgttgactgacagcaagccagaaggacaagaaaaagagttagaaatcggaagagaagacaatgcaatccaggaagtatcaaatacatgacctgagcaggaaaaagaagactttttcgaaaattttggtttgtttctcattggcaacaagttaatatctttctcttttgtacaaaaccaggaccgaaaaagaaaaaaaaaattggcataagaaaatgaaaagcatcagacacaaaaccgggtctaaccattgaacacaaagaactccgaacaactggaaagaaatcgtctcaatgcatgggaggcgtttcctggaaaatgaaccggccaactttcccgatggcaacgaatgcatgcatatatgggccctagtccctcggtgacggggaaaggggtggaaaaaaaagagcaaaataatgtatttcgggggaacgtaagttcgtttgggggatactgcgcggaacggaaatttgaaagcaataaaatcatttttgagacgtgagtatctgctcattcctcgtggacgtgctggagatgattacggaggcgcaacgacgcaaacctagtcaaccgccttttcgcaaagaatcatctgctgcaataagctcattaccgccgttgatcccgtttcgaggctccattgatgacttggtgttcttgcggttcttcttcttggtcgtctgccatccataagcgatctcgttcgtgccgttagactgtccgcctgatcttcggggcgagtctgtgtgtcgatctttggtgcccggagtagaattgtgagagccatcgtgtcggccttggcctttgggcttgctcttgccgttaacaccgtttgccttgtcggaatggtcgccattagtccggcgcttcgagttcgtcgattgatgtcgattctcattcgacccggatgcagcaggtttctcgcccatctgtcccgagtgcttaggctggccgatttcctttcctgacccttgtgccgcaccattccttactcggtccggacttgtcttcgcgggttgctgtaccaggttttcggaatttgataggtggtagttctgcagcctactggcgagaagctcagactggccattcatgtcggactggttttccccgttcacaccattgaccttttgcgtttccgtagatggccgcgtgaagacagccgaatgctccaagtcaaaggatccggagtcctgataatcttgagacaaggaatcggagaaacttgcaggtgtgttcatgttgtgatcatctgacgaggtataatggctcaccgccgagtaagggtccatcaagtcagacccatacgccgagcgaggctcactgggacgcaccgatccatccacaatcagcggacctggtgcaactggacgtggggcggattgggtagcttgcgacgggggcttgggaactggaatgtgctccgagtgagcagtgtccgacgagaacgatcccggtcgataatctggctgaagaggaataaacgaatatccattcgagaccagacccatctgtgcggataatggcggcagcatggaaccttgctgcagggcttgaagctgttgtggggttatataataacccaccacatctggctgccggttatcatccacagaggttgagtgggatccattgctggccagactgtttgagcgcattacattctcatcaccactcccttctccgccttctgacgactcggtggccgacctttgttttgaccagttatccgtgggtggcggcatggtataaagtgggatatagccgggaagagagggtgagccctgaggccgtgcaggttgtgaatgcgcacgaagagactttggggatccgttcgcagttgacaatcgccgagaattacgacgagtatcaggaatagcactaacagcagacggtgagggagggttggtgatagtcgcttgcgagccagatgcaccaactgaagcataggtggggttataaatcgtttgatgtcgttgggttgggctgagagtagcatgactcgcggttcctgttcctgacctcgggcatgagttttcctctggaaactcttggggttggggaactgggaattggataaatggctgacggatgaagactggcggtggtctcccagtaatcaatgcctggctatgcaattgcatccgcaattcttgctcctgtgcctgcaaaagctggatttgttggtataactggtcatgcagaagatattgtgcttgctgttgtgcgtgcagggagatatcggttgcattgctagtattcgactgccggaagttcgacttgtttgcggtattcgactgtcgtcgcccgccagtgagcccgccgcgcgagaattgattattatatctgccgccgcggttccctccccgtccaccccgcgatggaagggagggtgtgagagttggccgcggttggggtggtggtcgttcccaggtccgctcttcttctgctgggaattcaaactgctgacaacatccttctagatcaccgtttgcgatatattcgaaggcccttcgcaattccaaatgcaatccccggaacgacgtgtcgtcggcggtgtttcctaggttccttgacgtgttgaacggctcctccacgcacagtcggttgttcaacatcaggtgccagcccttggcctctttgttgatcagggtgccgtcccgtactgagatgacgttcttctcatagtcaaattgatagccataataccggaaaaacccaaagagcaactcgccaaccgattgcttgttcttgcgaccaaattgacacaaggtcttcaggtcatcatcgaacgagcagaccaatccatcgtgagtcaccctcttcttgtgcggacgtgcttgcaaacttgggagaactgggggattccttgtctgcagaaagttaatgatcaaacagatccaggtataagaactaagggttccaccaagtgctgcatcattgagggttctttgctttgtccagtgcttgatcgtcattgccaaaggccgcactctctcatccacctcgacataggtccgaatcatccgagtgttttctagcgccaaggtattattgacattcatgtcacaggctaaacggagctccgggtcccaaatcttcacgatggggacctttgcatgcgacacacacaccacccgttccatcccatctgtttaggtcagtctattattcagtcaagttgtatcaacgcgatcccttacgtttggccaacacctcggccaacaggcacacatgttccaattccttgtagctggttgtgatgcaaatgtccactgcgcaagttgttagttatcgccttttatttctcttgtgcccaaaaaaagagaagaacctaccatccgagtcacttgaacagagcttattccccgacgagccaaaaatgttcgccttaatattatgattcggccattgctcattgaaaagcttctccaatttccgcacaagttgtcgtcgtcgatcatcactctcagcagacggtaacaatcgatcatacagatccatgatatcggtcgacaattttttctcctcgtccggactgagctgctccttcaatgcccctttctcctccggtaatatatctgctccgagactatacggtacccgtcgtcgaaagaatgccatggcggtctcatatttacatcctccaagcggtttccgggagaatgggggtaggtgtgtggcttcggagtgggtcgatcgaggggaggtgtttccgtgggcgggggacggcgaccgagaatggaaggagaggttgcgcgcatgttggtatggggtagaaggaagggaattcgactggtgcgaagtcaacggaggccgagcggcgggttcgggcacgtcagagtgttgcacattggattgcgatctccatgccatcgtggagggctgtgccgacgctagcgaggcgacgtcacggtgaagggaacactttgcattcccatcgatttttgcgaccatatagcaattcacaactcccacaccgttgtggtccttccgtacgggggctcggcaaaagagataagagtccactcccacacaccacacaatataatccgctcagtttccgctctggaaatgactggagaaatttcggcgatggataaattcgagcgaggtaggttatggcacgtgtgtaacaagtcaagggttcgttgatatggtgagacagccgggaagcagatcgtttgtggtgggagacaatcgccctcgaccaaagtcgcgaagagccgagtttttttttcctttcacgcgggaccgaagaaaatcgaagagatgtaaaaagacaatgcctcaaccaggagatgaaaataagacacgacaggcgaatagtcaaaaaaaaaaagggtcttcgagagcgagaagagagcgcaggtttcgaggattgggatcaaagaaaagcgacaaaaaaggaccaagatacaggatgcaacatacaatccgtgtgccctttcagtgaatttgtaggaaccagcctgggtttccgattgttgaggaaaggaagcgtagccagagaggggaatttgcggaagttgtgaagatgatcgaagccctggaggtcagcccctgtcggcggtaaagaagacactcccgaccgttccttaaagaactccaatctttccaacgtccacgattttatgtatagcagtcgagcaatcggaggaatgtattcagggccagtgtttgcaacttggaacagatgttggtgagtgggaaattagcttataacgtatgacggagtagcccacggagagcgactatcggggaatagttctctgccctcatttcttaaacaattaggggctgacttcggtcctttgtctctgatataatctctcgctaatatatttcttactagcactctttgttctttttcccccgagcccagaaacttgaagccctgaagcacagaaagccaatgcagagttgcccgcggtatcaccgagctatgcattcatgcaggtaccatgacgacagattattgataacccggtgtatttgttgagcctcttggactactagctattgactgaacatggcaattcctaagagaagccttatatgctccatatgtcgtactttctcctttttgcctcctgatcgtcgttcttcacttctccccgcgatcagcatggtccttgcacgtgctgctagtataagctaatccatgtcagtggcctgaggcataaatatgacatagatactccgtatgcttcagaagtaactatgttgtggaatctaagattctgtaacatacatcctcggtgactcaagagcactcaatcatacttcttctttgtttgggaaatgaatccaccatggacccataattcactccggaatctgacagtggctgcccgtattataagacttgagcggatgaaccttgcgagataatagccattggatattgttctggggctaaccgaagagttgatcgtcagatggtagcctttgtctacaggactgggtatcgccacattgggaatgtgaggcttgttttggcgtgtttctttgtaaaactatctacccctcttcaagactgactgaacatctagttatcaagattcaagacagctccagcttgcgacttataacgtgaccttcataaaatcaagcatccggcttgtatgactaggaccagattcggccgagagcagttgcatgtatgacgagtgggaagttactacgcttccgcagggtaacgcggaggcatgcttgcgcgtatcgtctagttgtaagttgtatctttccggagggtttaaagaaaagtgctgatgctgtagcgtctgctggatcaacctatacagacaacagggcagagttgaaggaaccgataactcgactgcactatcaaacgcaaatccctctcctactctatatcttttgagtacctcggtacctgcaatatcccgctataaagtcgattcaccccgattccacgtatagaaatggtcccatgtacatgcggggaagactcgggctgctgactggctcgtcaagccggctgagtacatacatgaacatcgcagcggccaatccaactcagaggggcgcggaccttgcggaagaatatacgaagtaaaaaatgatggccgtcggacgttgccccacctctcctgaattgaccgagttggtcaaagcacgttcaaagtgtattctggaagcggcaatgtactgactagtattgcattacatctaccccatgtgtacggagtaggtattgtttctactagtatatctttcaatggggacttttaacggacctgcttcaaccatatgtatacgaggctctctaaatgagcaggctacagcaggctacatcagcctacagcggactatacccattacatgcgtttgttctgcgcactttccatggagctgcagatcaaattccagatgcgactagagtgttcacttgcagcctccgatggcgtccataggcagagagttcttggcaagctgactgcatagtgcagagcctttgcagattccaaggttagcatcatcatacgttgactccagggaattccttgtttggaccgggttgtattgtgaagataatcttagaacaacttggaaagttgaatctttgaatattgtactgaaatggagtataaagacgtagggcatacaagggcaacacaatgtcaatgtccacgtttttaacggtttccaagattcgagcattaaccttcaataagatatagcatcaagtatactccgtacagacagtaatagttggataataagtaatcgtaactatcagacacgaggaagctcgacgcttagcccccgtgtccccgtccaatctccggtgaccggccccatcagtgacgaatagaagcccttcggttgccgggaattgccgcgtacttgggatcttcgatgtacaggaaaaagaagggaattgctcaggtgaatggaagtggaagcattgaatgacaaatacggggattgtcgatgttcagtcgaatgtgcagagacttgggtatatactccgtccagacggagtactccgtataccgttgtaaacataagatactaacaaaagaacttggataagtatctaacatgtgttgtcctactttcagaataaataaaaagaaaaataacaatctcctatttgcccccgtatactgtcgctatgtaactattttcctctttggcaaggcaatttatgaaaagaccccctccccccataaggtaatacacacccacccccccataggaccctctctctctctccttttctcttcttcatccttccaatttttggactttctctgcctcgttcactcgtggtagaaagaaatactcggaggcttatttgctgtaagtgccatgattctatttcgatttccaggctgggattttttcttctataccctatataccccattgaagatactttgaaagagcgcggaaaaaacaccctcgaacggttttaccgagcccggggtaaaaataaaaaaaatatctcaaatttcgagtgtttcttttttatgtgttgaaagaagatctggagaattgtttgaaaagtgtgtgttgtggatcgacgctcacatttttttactcgacagatcgcctctgaccggatcaatctcccccctcccctgaacagtcgcaccctccggtccttttgatctcgacaatgtcttcgtactacgaacctcagggctggcaagcacccgctgcgcgccaggtctcttgggagcagccggcgcctccctcccggtcaggtatgggatcaaacgccgaggacccccggcaaaaactgacattcgacaacaggatcgagttcggtctcgcagcgcgaggatcttccggccttttcctcccaatttgacggtacggacacacttctgcttgaatctctacaattgcttatccggaagccgaatcgcataatgggggataaagttgttgattttgaagcgaggcgattgtggagattacctgggcatactttttttggggggcacccttttggagacaagtgctgatactttttttttaactttatagaggtcgatcgtgcgatcgacaatctcgtcaagagcgggaagttgtggaatgctcctcggcgggattcgatgcccatgatgatgggccggccctaccccgactacggtatgttgcgggcacggatggcacccagaacgcgtttctgacttgtctcttgacagaccctcgtatgggtggtggccctcagcgacaccattcgatcagcgagttcgatggcaatcgtatgcccccggcgggcaatgcccagggtttctatgcctcccagcggtaccagggtcgtcccaacgaggtggaacagatgatgcaggcgaagcgtcggatggcagcacagcgtgagagggaactccgcaactatcaccaggagcaacagtacaaccgaagtacgtggtagcctctgtcttcttctttttgagcctcgttatattcccccgtcggctttttcttctctctcttttcacttccttgcatctatgtatccggcctgtgtaatatatttggtttggctgcttcgcttttcttttgaacacggggttttaatacttttcttcttcctttcaaggcctcctcgccgagatgtctgcatccaaatccgaccgatccaccagcccagctgccgtgagcgaggacagccgtcgcgaactcctcgcccgccagcaccgcgctctgtacggcaacgaaagcccagccttcttcccgcccggtgccttctccgatgataacccacgcccggatagccaagccggcggtggcaccccgtcgtccgccggtgtccgtggatcctccccgcgaggcatggacccattcggcctgacacaggccggcgctactggcaccgatgccaccacgggcctgcagtcgccctcgcgcgccaacagcacctcctcgcctagctccgctattaacgctagtttcggcggtgagcagcccgtaacctcggcttcgtcgcccggcgcagactctccctcccgccaggcctcttccaagcccgctggtcctattggcaccgtcggtcctatcggttcccgtcctgctcccggccagacatctgcaccccctgccaatcaagccttgaacaagcgctccatcacccctctcccctccccacttgggctcggcttcactcccgctgatcctactgctgggcccgctactgagcgcacctcctccgccggtccttccccggctgtggcctctgcagccggtgcccctggcaccaaggaccaggccggtggtgttggcctcggctggagcaacggcagtggcgtctggagctccaagagcggactgggcgtgcaagcttccgtttggggatagatatccacttttgatgacattactccaagtgggcgcttgttgcatattggactagggttgtgctggcttaccatgtacttggcaggggagaaaagggacagggtttaccgggttttggaagtggtgttggatctgtctggatgatatgatgtctgcttcgctttctcctgtgaggtctcgggttcagcatgtttttgttctgcttttttgtttgttttgctatgtcggtgcccgtgcgaatatggtcggaaatatggcgctttatctgtgatgctcgtgggctatgtatgggctgtctcatttttctcggtgtttttcatgtcggatgcacaggtctctttcttcatctttctttcttttttatattctggggtgatggtacgggaaacttgcacattgtgactttattttaatgcctgttttttttttttttttactatatatctctatatggagatgggaggcgaaccgaggctcaaaacggatatttattggatttggatattcgacttctacttgtcttttctttttttcttcccccttctctctagagtgggtgaggtttgattatacggttactggagtctgtctactttgtcctcaacgggttttggcctcgtttcgacgtgatcaggaagcgaatgttgtgtctttacatacctattgaattctcattcattgccggcgtcttgtcctgtacaggtgtgtaggttcggcactatatgtctctggcctcacggcacggtatatatgtaactagtcatgtcttctatttagggcttctcatctcgcaatctggtagtgatttgtcttgccatgctacactgatatatatctctattctagcttagtttaatcctactacctctaccaggggttcaatgttgtttctagagtacgctgacgagataactagatactcgaatagagggtaaattgtattttattcccgaataaagattggtagtttaattccaacaagatagatgtagcaattgtcgagataattaagcattagtcgaaagcacgtaaacaagatcgtctttttcttgacaggcatctaacgcagcacacaacatagaatctagaagatcttcggtcacatctatgatccccacaaagatgataaaaagaaaaagcaacgaggatatccaccgggattcacactcaaacagcgctggtattcaccgtgggagtgtgttttgaggtgtcgtcgggggtttgagtttgatcctgaaattcggcagcggtagggatgacatgcacgatcttcctcttggcagtgaagagaccgacaacaccacgctcctggttagctccaagccagggcttgcgggcttcactcaagaccttctgggccaggaaatagatcagctggccgatgataatcagcacaaaggcaatcgggtacatccagtggatatgataatggaagaccttgacgccaatgatcacaccccagaagttcatggtgagcatggagacgttgaagaaagccgccgacgagagacggaacaacagcggagcgagacagtagaacatactcagacacagcgtgtacccggtgagatatccaccgacctttccgttccagtgcgcattgtggaaggaggtccggtcgaagatgccggcctgcgcgccgttgataatcattccgaagaatgacatctgcccgagcacctcgtacactggccgagtgctgacgaagtactcttcgcccgtgttggtgaggccatagaaggacgcggctagcagcgcgaacatgtcgcctttcagctggttgccttgggatatgtctccgccgttcgtgccggtgatgtggtctgagccgatgaggacgcccattccgccgatacaaagcaagataccaattatttgagcgatgtggtagcgcacacccagaaacaggaatgagatgacgacgaccacgacgatggcccagaagttgatcagttgcgcgcttagcatggttgtgtattggtatgccagcacaatgaagtagttgccttccacgtcacagaaagcaaggatgatgtctgcagcggttagtcgttgtatattggatatgtgggaggggaaactggggcatacatttccagccgtcacggtataccagtcggagccagcccttgaagccgtaacggtacatcgtataaggagtaaagataacgttgagtagcacatagtttatgaaggtctggaacgcagggattgcccattgttcctcgccgagtagcgttgtgaaggtacccgtcgaggtattggcaatagcgagaatttgactaggagcatttgggttagggtttgagggttgagctgcagtgtttgaactggttcttaccctagaagcacggtaatatagaattctttagtcttaaagtagccaaaagctcctttcttctgatcgaccagatccgcaggttgcacagggcactcggaggcttccacctgggaactcgaactttgtgcacccgtttgagcatccttagccagtgaattggtagagctgccatgttcgacaccagatgcctggacggtgatttggtccttcgactcagacatgatggactgatgcgagctcaaaaagcggggttatttttgaatgcagtggcaaaccagttgcagattgaagcaacgtagcaagaaaagggagctttatgaaaatgaaacgagcgcaaaactccctaagtcgctcgcggattgatatcccggttgaggttgatttagatgaagaagcagaaatctcaaaagcaacccgcctaagaggaaaaaacgtctggaacctttcccgatcgggccatcgtcgataagaaacttccacgctgttaagcacagccaatcagcgggaggatagtggggacggtgagggtctgtgctgcggacagggccgtccatctggtcttgttatgtcagcagcttcaagcaaggtggctggtacttggcgggtactgggagagacaggctaagcatcagcctggccgaagtaccttccgtgtaacctacatagcttgtggagatccatgcgttgagttgaccttgcagagcatatttatagatttatagattgatggatgaatcttaaattatattactccgtacgggctttctattgtacacgagtcagaccctgttaactataaataccttatgacatcttgactgacgccattccgaaacccctgagagagaacattgaatggattccccagctctgccgatcacggaagaacaccagaatcacggagatcaagtagtctcgatttagcataagctgcattccaagtggtatcgcatatttctgccgcgtgtgcacaataccataggtacctggtgcccggtacctctatagtcggacgttgttagaaatatttaggtaccttaggtacctacgtcgatgatagagatgaaatagggataaacagggagcatagggaatcctggaagacccggaagttcccactctctcttcacatcctccaaagtagcttcttgcgaaactcccggggtctttaaggggaaaacaagttcccatattccaagtacctgccgaggccgtcaggtggaccaggactgtttccgatcgtcatcccctccgcagactctttcatcattgggatctccacctccattccctctttgcgtctgtttcaagccctttccaaacaacccgtacacaatcctccgataaccttcttttaatttcattccgttccccacccccaactgccctttggctctcctctcgcgccggtgcacttttatcaggcccggagtgacgagacgcctttccctgttcttgccggaccatggcgctggaattacagccgcccgacggtcgccgacgagtgaaggtttatgaactaagagataatgattggtttgaccgaggaaccggcttctgcacgggtcagatcttaggagtgagttgtcgcgtgttgtgcgcgtaccggggacgtgcgatgtttcatcgcgcgcaatcccgagcgcatcaccaccatcgtcagtagctgattgctttggactaggaggaacctcgcatatttgtcgaatctgaagacgtgcctaatcgcgtcctgctcgagacgcggatcaccaagaacgagggctatcaaaaacaacagggtacctatcccgccattatcggctcatcgctgttggagatcttttttgactaactgtcacgcgatccagagactttgattgtttggaccgagcagaatggcacggatatggcgctgagcttccaagaggcggaaggctgtgcggtcatctggtgaggaatcaacaaaaatctttgcgcgcatcagctaaccacgtcgaagggattttgtcaatgccgtccaacaacatctcttgactctcacttcagctggtaaggtttgtcgcgtgtttggaagctggcatctctaattgttttctaagatgacgctttgtccgacgacctcgataactaccagtccatcgtattaccgacccccgaacttggaaacctccccgaaatcgaacagattgtacgagctgcgagcatgacacagggcggtcgggatgcgctatccaaatacatcattcgcgacgagtacatcgccaaattagtaccgctagtgacaatggctgaggatctggagagcttgatcgatttgcatcggttgtgcaacatcatgaaatctctcatcttgctcaatgacaacaccatcatcgaaaccgtcgtcgccgatcatgtcatcctcggagtggtcggggctctggaatgtacgctttacccggcttcaccctggcgaatacaattgatactgacgaaaacagatgaccctgaattccctacacataaagcgaaccatcgacaatacctcgcagacaaatcgcgatacaaggaagtcgtaccgatcaaggacccgatcattcgccgcaagattcggagtacatggaggctgcaatatctaaaagatgtggtattggctcggattttggacgacccgacgttttcagtgctcaattctctcatattcttcaatcaaatggagattgtgaatcatattcaaggaaacgggccctttctgcgagacctctttcaagttttcgacccgagaaatccggaccagaggcgcaaggacgacgccgtgcagtttcttcaccaatgtgcttccatcgcgaaaaacttgcaggcgccgtcgcgggcccaattattcgccaattttatcaaccatggcttgttcgccgtgatagcgttcgccatcaagcacttgaatccagctatgcgcacgactggtattgatatcttagtgattttgttggagcacgacccagtcatgatgaggggctatatgctcaaggccgtcaacgagaaaaagacgccactaacagacaccttgatcgaccttcttcatgtggaggccgaccttggcgtcaagaaccaacttgctgatgctatcaaggttctccttgatcctcagattcccatgcaggacccgcttggtcgggctggacccgattacttcaaacttcgcactaacagccttttatctgatgcatttgtccagcaacattttgacgagtcctcaaagcggcttttccaaccgcttaaacagcttgcaaatcgcacagcccgtacgtggtgaggtcttctgttttggtccagaatttgctaatctcgagtctagttaatgatttgacattccaagaggtcaccctctattcgcatcttgttgaaatcctcaccttttttgtccgccaacacctcttccgcacacgtaactctatacagagtgaatctcttgccccccgcgttgcacagcttctgcgggcaccccagaaacacctcaaactcggttagtatacatcttttccccagaagccatagctaatacagacgacagtcgccctcaaattcttccgcaccctgatcagcctccaagataccttctaccaagctctcatgacacacaataacacatttgagttgattctcgacatcgtctacgagacaatgcctcgcgacaacttgctcaactcggcctgtcttgaactttttgagttcatcagacgggaaaacatcaagccttttatcctccatgtggtggaaaaatatcgcgagaagctcgagaacattatttatgttgataccttccagagcctaattcttcgatatgaccagatgcagggttacggagccgaagccgatgcgacactgttcagtcaggatgaaagtaacgctccgcggagaattcctctcaatggccagcgctggcagggtgcaagagagatggatcccgcggaagaggattatttcaacacgtccgatgatgaagatgaggtaggtagtagcacttggattgagacaatttgagaatacgactgacaagacaagatgaagtgggcacagaaccgtgtggctactgcggatgaacctccaagcggatccgcctctgcggttgtcaaacctttggttgactacccagatgacgacgaggaggacatcatggacaccaaacctgaaggggcagggcaacagccagtggtcggtccaaccgagacttccaccgaggttcctgcatcaccacccacacagaaccctccggagcgacttgcagagaaacgtcgccgtgaggaagaagatgatgatgagcttagcaagcttaccgcgggacctaaacgaagaagttcaacgagcagcaattctggcgcctttaacatgaatcggaaaaagagtttatctgccggatcactgacagataagaatgcctcaccgggtgtattaaataatgtcaccagcgcggcgcctaagagaatcgccatcaacattggatcaacggccaaaccgcccatttcagaaactgacacaacccgcacagaggtgacgagcgagatttacgagaaggagaatcgtgacgatagtcagggtaacgagggtggatgaatacctcataagccaggcgttttgaattaagtatcctttttcatgacctaaataccacatttggttgcgggatttcccatgtttcatctcttgctgttctttgggcgatgcccatgccccttcttcttgctccttttctttcttcggggtatccctcatctgttttccagtggtcttgtcttctctggcctgaactagcgtctagttgaatgttgtacatggcatggcgtctgggcaatgcattggatctagccttgcggtgtctattctttttattttcctggtcgggcttagatatcgaccggtggaggaccatgcatccgcggatggagtcgttgcagtatcctgccattttcatggtgttcgttacctggaattatcttctagtgccgtagatacggcctgcacacctaccactatcaaaatacccatagagcccgggattatctctctccgtggttctttttctttttccttttctgctttctttataaacgtatcatatattttcgggtggtcgaggggctagcattggtggttctactccatagatgtagagtgcctggatccaccagccaaatccgacttcacctccccatcaatcctgcgcgattcattcaacgaccccggagtaatcatatacacaaagaatacatagaaaagggtacaattcgtgtaattatactccttcaattgtcttatattatctatctggacaatcactaaccgaggccagaccacccaacgaccccgtagccatctatataccctggataagagcgcgctacagcagattccatgagacaagccgaacaaaaatggcatccgaaattacctcaaatacctttctcaccaccacaggttctccatcagacccaaagacgacaatcttcttcatctccggcaacccgggtctgatcggctactaccacccattcctctctctactttcgaagtatctaggcgaggaagaggaaaattcaccaagcttacaatcattccaaatctacggctcatctctcagcggctttgagattgacgaacaccagccctcgccgccaccgaacaatggcgttgatctcgatctagaaggtcagatacgctttgtccagggaaagctcgctgccctaatgggagaccaaagaagcggcaatggtaacggtaaagctaccgtggatgctggagctagacagaaagtcatcctgatcggacactccgttggcgcatatatcgccatggaaatcctaagacgacaccgcgaagcgagcccagaaagcaccttcgatatcatcggcggagcaatgctcttcccgactgtcaaggatatcgctgcgtcgccttcaggacagaaattgacggtacataatacgcctcttgccagatgcttgtgcttttcttttccttcgcttgttgctaatcccggctcggttacgtagactctactttcaatcattccccgtcttgcggtggtggtcagtctcttcgtccgactacttacattcctgctcccgacatcgcttcttcgatatgtggtccggctcgtcatgaacgatccccctgctcatgctttggacgctacgtgtgcttttctgaagagtcgcggtggggtacgacaagctttgtatgtgtgatattctttcttgctatgtttaggctttatctaattactcttcgtcggctgctagacatatggctgctgatgaaatgcggactatcacttcggataaatggagtgatgatgtctggggcgctgcatcggcgcgtgagcctatcgcaaagctgtttttctattttggtcgtaatgatcactgggtggctgatcagacgagggatgacattgttgcggtgcgtgggcggaagggaggacaggctgggccgactatggttgtttgtgaagagggtttgccacatgctttctgtttgagtaagtggatttcaatcgactttgactacgatatgtagctttgctgacagtttatagaacacagtgatgtgatggcacgaaaagtggcggggatgattgggcagattgtggcttgagggagaggctatggcttttacaatctatgcatagaatagacaggaactacataaagacaatgaatttcgcctttggcgcagattgtaacgggtatctcaagagacgctacgccacgcccattcccatcagaatgaaaaagagcccaaagctattcaaatatacaataaatcataaagctagacgccatgtacaaatgattgacggccgaaggaatgttcagcactctattgcccctgcccctgcccattgctgttgccttgttgagctagccctgctctccggaataaatctcctagcacatcggactgcggctgcggtgggggagtaggatggtgaggcaccatgtgttgatagctggattgctgtgggtattgctgcgggtgctgattggggcctagatggtgtgcgcgcacactccaagaatcgtcctgggcgcgctgctgaccaaacatgtcttgcagcgaaatatgacgtcccataggcaccccagtttgtagttcctccatcggaggtgcctgtgtggaagccgccattgctgcggcgtgcaagctagtctggcgcatagcctcgagacgttcgcgagctagcttcatgctctcccccgcgtgggtggcgcactcgagaatcatctgggcatttatggtgcgactctccgcggtggagtttggcggcggctctgagtagatccagagaccgtagatgcgcacgttgtttgtgccggtttggttcttggacaaattctgggggtgcaaggggtcggcgatgccattttgtccagcttcgccttcggcactttcttcggctttgagaatcacatattcctctgtaatttcgacattctccccctcggtgagagggagatcgaagttgtccaacccgcggcggtttaccacgaaggcagtatagcgatcttcgcctagctcaccctgtgtttcctgacacacaaacagggttccttcgactccgttcttttcccattgttttgtcgtggggctgaagatgtaaacaactgcgtagggggcgagtgagaggatggaggtcactgagggcttatggcggcggataacagagaggttgagctcttcgttcgagcggagcgggggtgcaggttgttgctgcatgtcggagtagtatggggcgtcagattcattatcggtgaggttgacaggattgtgattgttctgtctccgcggtttgcgtgcagtcatattttctgttggaacccttggaattgtgcacgatggaaggagctggggcatatcgtcatggcagctccgccttcgcgcttatccggcgtctctctactttctactttctctctactctctacttgcgcctcttctcttttgaacctcatgtaaggtaattgggtactggcatatatttgattcctttctgattggtctcggcatatctccttccctaaatttcgcgtgatgaggatccgatccttctaaaccttggtgggatgacacctgatgaaatgagccattgtcgcattatacaaccaattcgctcaattcgctcaattccttctatttatcctatggtactcattaccgcttcgttcttctactgcaacaacactcataccctattttcccttgccggaattaaggaccgcgcaagcgcacacattcatacatacatcacgctacatactgctaccccactgaacctccaaccatagccaagcgaggcaaagaagctttatattgtgatttcacagacaatcacacaccatgagtcctaaatcgcaaccgtcatccgcatcagagcacaagagccacgaggccgaatacacggaagaaattaagaagtcaggactcgacgttctgtcactttcacgcgcgatcagagcaaggaaagccgagtacacacgccggagatcgatccgagtcaaggtcggcacgtggaatgtagccggcatctccgacaccgagaaggacgttggaaggtggtttgttcagggagaaggggtgtgcccgaagttctctgggacaaactacgcgcacgagccagaatccgattcgcccagcaagcccgacgagccaaaatcagacagcgataaaaaagtaacttttcactacagtcccgaggaggtagacctgtacgtcttgggcttgcaggaagtggtcgatatctcttctccaacagaagcgttccggccatatgttgacctcacaccgtccaagcggtggaaggaagctgtggaaaaagcgctacccgggggatataagctagtatctgaagtccagctggtcggcttgttgcttctgatatatgtgtcgcccgccattggagacagtgttgcttctgtcagtagtacatctgtcggtacgggactgatggggtacatgggaaacaaaggcgctgtggcaacgcgcattgtcctgggcgaaaccacccgtttggtctttatcaactgtcatctcgcagctgggtctgacaaaggcagcttggagagacgcaactgggactcttctcagattgtccagcgtgctagatttgacgcggtttggcccgaggatgacggatcgggcgaatcgggcgaagcaataggagatgaagatttcactttctggtttggtgaccttaactaccgcctcgatgatatcactggcgacgatgtgcgccaagtcctctctcgacataccgccaatcagtacgacaaagagcgccaagaaaagatgtcttcaagcccttctggctctacggccgattctgatgatgattcgccttcctcttcttcttcttcttcttctccggacgaggagacggagtcagtcactgcaactgtcaccgaacctgtcaccgacgaacagattgaccctcataatgaccccgcgtctcttcaaactacaattgcctcacttatcccgcacgatcaacttaaacttcagcaaagaaaaggatcggctttccacaagggttggcgggaaggtcatatcactttcttgccgacgtataaatacgacgttgggagtgtggccatgtttgatacgagcgagaagcagcgcgctcccagctggtgtgatcggattctgtttcgtagccagcgggataagctgagacatgagaagctcgatcaggaagcggaggaggcccgaaagagggacgaggagatgaaggcaaggggactggacaaggctgttgccgatgataacgtcttgtttgattatgaccctgatgaagacggtgcgaacagcgaggagtacatatcggacgaggatcaagccgctgatgatgatgatgatgcaagcacaattgcatcgctcgactcttgctatgatttaatccgcttggaccattacgtgtcacaccaaggcattctgtcgtctgaccacaagcctctggatgctacctttaccttgagttttgatgcagtcaatcgcgatctgaaatcaaaggtgcatcaagaagtggcccgtgaattagacaaggccgagaatgaagctcggcccgatcttactattgtggtggatagacatagtgaccataagcgcccagagaaagatcctgacaccgtcgatttcggggatattgccttcgatgtgccagctcatcggtccctaactattgccaacaccagcggcaccccggcaactttttcatttgcggagcggcataaagttgtcgacgagacaattacacaaacagcctcgtggcttgttgtgcgtgtctgcaagtctgcagacatcgccccagacaccggcccatcgatggcttcttcgtctgagagccacactctgctccctggtgaagtagcgaatatcgatgtcacggcttacgttcgcaacatcgaacacgtccgattgcttaatattggaaaggtgaatctagaagacatccttgtcctccatgtcgatggcggccgtgaccactttatccctgttcagggccgttggctacccacctgcttcggttgcagtgttgacgagttgacccgcatgccagaagcgggtgctcgaagcttggccgaatcaaaaaccccacacccatccatcacagatacttccacggaaatccgcctgtcggcaccccgcgagcttttccgactgaccgaggcgatatccgagctgacagagcgcgctgttgcagagtggagcatgacaaacggtgaatccgaggagcataaagctccatgggcaacggatctttccgggggagcctggcctttccagcctgatacatggactctaaaggacccacaggagcgtgctaagctgcgaaattccgtgcgtgaagctcttgacaccaacaaatccctcagctcaatatttgcccctgagatatcctctcttcatcggttggaggtcctatctgaaaccctcctcactttcctcaactcgctccaagacggcatcgtcacggcgaaagtatggcaagacatggagcagcagatagctgcgcgggagaaaagcaaatcccctcctcgaaactgggaagaaagccagtcctgggtgcttgagcacctggcctactcaccagcgcacagcgtatcattcacgtttgtcacttttatgctcgcccgcatagccaatgaagtggctccagtatcggccggtacgccgttgatcccattatccaagcaaaagaacaacgccacccccaataaaccgatagataagcaggccggggctgcaagccagaatcaagcccagtctcctactccagcttccgctactgccttcataaccagcggcagtttccgccgcaagaaccgcacctcgagcacatccaccagcaccagccctgaccccccacctcagaaccattcaatagcacgccgtcaagcagtcgagactgctctagcgtctgtctttgcacttgtgcttatttctgcctctgctccgatgccgtctaaagagaaagagcgtcgtatatctgaagagcggaggcgatcgatcattgagccattcttaaagatggttggggtagatgatcgaggtccatctgggggccggtattgattttttccgaaccccgtcatgttttgactcccatagacttggcttttgaagttgttagattccatcacgttgtctcgatgtgtataatgctgtattgaggccatgtcttcacgttttcctctagagatcaatgatacaggctgggcaagcaatttgaactaaagtcaattttcctatcctacagtccatgataaattatgctccggaagtgcttaagttaatacatgcacgccaatatactgatcgctcggtcatcaccccaatacccctcactaaatactatgcagtcaacaagaaaacaaaataaaagtccatgcatatccccatcaccccccatccccattcctcacctcagaccgccgctgcgacaccagcccaccaccctgccgatatacaccggatgacccagccctagccttccccttcgacgatttagacttcgatctctgctgcggcgcaggcttccgcccgatcagcatccgcttcgccccaagccaacactccgagaccgcacgcccaggcaaaccgaccagcgacagcgcaatccgagcagggacgacgacgcacgcgcaagcccagtccagcaagacgagcgcatagtttggacgacgagactcggccgaccgcgtcgcagcagccgccagcgcaagcgcgtcgccggcctgtgtctcgaggcgcacgaagcgctgatcagtctgcagggagaagagggcggatcgtttctcgtagcgacggacggcgcggttgagggcttcgatgtcgggctggatagcttttcgggtttcgagggctgcgttggcgaccagggctggggagatctggggttggtcttgttcttgtactttttgggaggggtctttggtgtttggttttgtggcgagacgggcggttgctgtctctgcgacgtgggcttcgagctcttcgaggcgtttgactaggtcttggagggttgttggggttatgattgggtctgttgcggatgatacgatgcgttggaggtggagggtgcgcttttggattagtcttaggaggtgggagactggacggacttcggaggctaggaggaagatggttaggttgtagtttgatactaggccctcggagggtcgggagagactggagcggatagcgtggaggagaccggtgccgactagagggaatatgaagcaggtggctagagcgatgagctcgtggatctggagctcggagatggctgttgctgcatccttgtgttgttcttggtcgtcgagctcgaatgggggatcgccgggcgctggaaatccactttcttcgtgtcggatggcctgggccgagcgataccagtccctttatatagttcatattagtactttgtttggggagattgtgggggagggggggccataccaaggtaaccggacagaccagttgaggaatatagcggccaagactagtattgtgacgtcggtgacgaacgaactaccttcatggaagaaaatgcctgctattgcgggcagcagggccaggcctagcggtgcagaatgccaatgcgattcttctgtcgagagtgtgccatggcctttttctacacggggtagaaacaagtcgtcggtcgatgagcggatagagttgcgggcctccgagagcgtgtccgagagggttgagttccgtcgttgattttcctcaaaggtacgggcgcgacgtatgttcaagggccgctgagtgggtgcatccgccatgttgtttctgaggttgggaaaaggaacatgtgtgtctcttacttacaccatacggcctggagagtatgggatacaatgccgaggatgatgcaatgaggcccgacactccagggctttgacttgaccatcgaagaacatttgaataactgcatataaatatgtaggtagacttcctaatagtcaacatgaatatctcgcattttatatatcttttcctatatgattctatattttggcggctaacacccataagagactataaacaagacacctgagaccaagactactcttgttactagctatgtagcttgggaactatgccatatctaaatagtagactattcagtaacgagatatagacgcattttaactatttctattgttgcagtgtcatttattgttagccgagggtcatcctctacggactagacgcatcaactctctcacacctttaaaatctggtcaatcttctaatttccccaacctgatagactagacagtctagatcaattatgaatcattcatctcccatgccgaagtcaaaaataacaggcggatcagaatgaataaactccctgccctttcgggtctattgacacccaaatccggactggggtgcctcacactattcgctcaaccacaacaccccagacgatgggcttcgaatttctttattcggctcctttcatcttctttattctccttattgcaatttgttcagtctaattcaaagctaattcaatggacaggtttctttgcttgttgcagaatatgtcaaggcctggtacccccggccgtgggttttgcttctgcagcccatacctttctctgaatagtacatgagtttgctcaatacacgatgtcttgagctatgaatcaacctcctgattctcactattcggatctcaataagaaatcgctgtcaatcacctcccctggctgagtatacttcatcgagagaggatggttccaatccattcttctttctttcatactatctcttagtctccttgatcattttgcaagagaactggagttccagactatctacatattctttttaatctctgttttacatctgccgtcatggatattcaccacagatacccgcaggccgtggctctaccaattctatctattttctccattgctctcgctattccgccattaattctgcatggaaagaaccgaaatttccctgctactagtctgatattctggtcaatcctcctcaacttgttcaacatcatcaattctctcatatggcccacggacgacgtggcgtcgtggtgggatggagctggtctctgtgatatcgaggtcaagtttatggctgccggctacgtgggcatcccaggaagcctggcatgcatctttcgaagtcttgcaatcgtactggatacagaccgggccacattagtcccgagcagaggtcaacgctggcgcaaccagtgcatggagattctgttctgcgttgctgttccagtcaccgcaatgatcacacatatcatctggcagaagagccgatacttgctatttgccatctcgggatgtgtgaacaacttcgacgagagctgggttagtctcgtctttgcatggatctggccgccgattatctgcctcattgcagcatattattgctgtaagtatactcccaactcacttcaaaaacactccattaaccaaatatcacaggcctggtcctcatccgcgtacacaagtaccgaagcgacttcgcaaacatcctccgcgcctccagcagcaacctcagcaaatcccgcttcctccgtctcttcttcctggccctatcaatgcttgtctgcatcctcccacttcaaggctacgtcgtctacaccgacatcatcctctccctcccctggcacagctactcctggagcagaatccacaacggagaatggaacaccatcaccaaagtccccatcgacggcacagtcttcttcgaccgctggacccccgtcgcatcaggcttcatgatcttcatcttcttcggcttcggccgcgacgcaacccgcatgtaccgcacagtcttctggtacctcggactgggctactgcttcccgagcatcgagcccccaaccgatacgcacaactccggcccttcagcggcgcacgcctcaacagcaaccacgctcgtcggcagcatcggctcccgtgcgaaatcaatgttctcgcgacagaaggaatccttcgctacgtttgtctcgacgcatggcacatacaacgatatcgaaaagggctcttcctcgcccttgtcccgttataccaggtctaccaggaactcgcgctggaatagcttgccctggtcgctctttaacagacgccagactcgtcaggatatagatgggacgctgctgaatgacctccccgttggtacttcgctgactgtatcctcgaatgcttgggctagtcgtcgtgatagccgggatctgtctagtggacctagttcgcctaagcttagtaaggatttcattcatgtgcgccaggttattagccagcagagcgaggtcaggattcaggtctagtgggcttgttcttcttctggttgtatctcggcttgcagtggtttcattacggtttgctcatcttgcgtttgcgttggtctgggtcatgggatctgttgtctagcagagttttacttaagtatcataatacataatttgatttgcgcagttgtgccccacacagaaaggtagaagagttcagcgaaggcgtagtccccgggttggtggtaggccgggatagatcctgtctgtggcttatatttcgctggtataaagtgaaataagtcacaacttgaatctacgaaggccaatattttgagaccaagaatcgagatttagcatactaagtctacatcacacgctaccaaaatcaaatcatccactagaaaacaaaatgtatccagggtattgtacatattatcacaccgcaaaggaggattcaatcaatctcaccagccacgaaatataactagcaacatattcagattgatcgagccccaatcaagccatttactgagactcgtcggagtgaccggagttatcgggccgcttaaggacctcgagagtgcctagaagaatgttagatcgaacccttttctctcttgctctgggaggctaggagcagatccagtaaacgagagatcgacatacgctgcacaatgttcagagtggaccggttttgaccctcggaatcttcccaagtggacatcttagcatcaccttcgacgtacaggagggttctgcgggagaaagttagctcatctgcatcaagctaaaagcttaaatagctgcattggcgcaagttgacaggaaattgagcagggtaaccccataacccaacctctgctcaaccacatgacatgaaagagtaacgtctcatccgaaagcgcgtcgcttgaccgccaaatcacctatcatatgttcaaccaggcccgcgttgcagatcatcatgcagccttcaagcgcaagctctcgctctcgctcgcgatccgcatagactgcacacgcagacccaaactcaaacgacaagatatagcaaacacacgacgaaaaagacgcaatccaagcatgcagccgcacaagccagaaaagtatcacgagtagccacttaccccttctgcaagccaaggatgaaatcgcgctggccgccctcggggacgaagtttacgatgcgccaccagctggtctgacggttctcgcggttgccgtgggaagtggcaatggtgtatttgatgatctcctggccggaggaggtggcatggagctcgggctctgcgccgaggcggccagtgagggtcaggcgggcgatggcccagttgggcgaggtgctgaaggtgcgggcgtaccgggggatgctggccaggctcatgctcaggttcgggcgcagggaagagatgaaggtagacatggttggatggaggacgtgtgaattatggtttatggtaaggatggattcattggatttgttttggcgtgtgaacgttgttgaccataacacgtgatgtgtacatgggctaccgctttcagatgtgatatagtggcagaaggcactattaggctggctatcaggattattattggttattatggtttgaatcagggattttggttgcaattgagatatcctgtagattgaaataagtgctccatatttatttggtgaagctcataagctcatgcgagagagctatagctagctctaccccggaattgccccttgtgcagggttctatctacgggtgcagacagctagttataagcatcagaattagaaatccaacgtctcgccttggatgtcccgagtcaaaaggaaaaagaaagcaaggacaagcaagcaaagaaatgcaaatcaaacgacgggcctaactctattattttgaaatccttcataacgccatgtgaatgccaacagggtataatatttttagcccggtcacgtcagtccatcgcatccgactctcccgaaaactatatggatttccgcgtattccgtataggtacaattgtacaattgtacaacatgcaattgtacaccgtcagcagcactaaagtggaaaaagcagccgataggcagatcagccaggggcagatcccagcggagatgctgcaccgctgctgattgactgaaccagaccgagataaattaagatagctgttgtctcagatgcactccttacatggtcaattagcggcccaaccacgtcgccgcagatggggcctttggagtcaacaatggttaacatggctaacacggccgacatttgcaggacaataagattggtcaagtcgacggtcaaagtcaaattgattcggctcaaacctggaaggtcaatcgccaaattagctgaatcgatagatcggctacaggcaaagcgcggcgccacccgaactgagagccctggagtctgctgctgctgctgctggggggtttttggttcaccgcgaactggcgacgtgagtataaatgacggtgaatttgctcagaagggatgatctgacagctcactcgaattgaaaatgcagatcccagtgtgttgttcaacttaaaggaagcaaaaatcagaaattaaaaaaaacaatagtcccatcgagggcccgcaataacatgtcgtttcatggttggaatctccaatactatccacaccagggacaattaagccacagtatggagacatgaggatattctctctctctctttggtccgtgccagtgatgctagtccaagtcaatccaagctaatccaagttagtccaagttcgtccttgctagatcggctaattccacgatcggtggaggcaaagtagatagctcagcttcgatatacgatcgcgtggcttgtaattttattatcctctcagattccttgaattcatgctggggctccctcagctgtaaactcaaatatgaaagccctgttccattcatccttacgcgttttggtttatatgtaggggaggcttagggttgtctccgttggtcctttttttcttcttcctccttaccctacaatgtgtccctgaccgacgtcaattaattctcttttttatttttaattattaatatttgtctattccttttgtctgtattaatttcacgcgccgtgtgactgacaccgcgggatatgtgaaaggcgtgcaggccttagaatacccaaggacatttgcatttcgcttcagaaactggagtcaagatgcggtggtcttttatattcgtcttaatagtgtccctgtttctactagggacattggcagcgccagcttcgcccgcgggacgacgcaatgttgcattcgccaacttggaggtcagacaggaaaaggaaacggattctacaaagacagatgctgccagtgagactacgacggcaacacaaacagatacatcaaaaacaacaaccgaggcatcaacatctgtcgaaactacaacgacaggcgctactacctcgagtactgactcgactactacaacgcatgcgacaacgcatgccacaacaacgacttctgccgcttctgctacctccactgtaccttcgctcgacggagcaactgaatcttctcaacaggaagcagcagactccagtaggccgacctactccggtggtctgccaatcaaaccagtgatcacgccggcatggggtgttgggggagttatacttattgccctcggggctgttctggctttcattggtgtccggcaacaatggtatttaagctacgattctttgatgacaatagcattttctaacaaagaaaagggtccaaatcttcctctcaaccggatttcttagcgcattgggagttaccgtaagttctatactcgaaaatagcaaagagcaaaaactaaccaactcgcatacaggtccttattatctatgtgatgagcccaccggtcagcaatgctgtacagggcggttacctcgtcgctgtcttcttcaccggcgttgtgttcggtgctttatcgctcgtcttcagagagatatgcgagggactgggctgtcttctgggcggtttctgcctgagcatgtggttccttgccttgaaatccggcggccttgtaaccgaaagtggctccagggtcggtatgatcattgcctttactgtaggtttctactgcctgtcattcagccattatacccgatcatacgggttgatcggttgcacatcattcgccggtgcaactgccttagtccttggaatcgattgctttagcagagctgggttgaaggagttctggttatacaactggagtaagtctaacaatttttcccaactgttgatagttgctgacagacccagacttgaaccaaaatgtcttccctcttaacacggacacttaccccgtgacacgtggtattcgtgttgagctcgccgtgactatcattatcgctgttctaggagtaatctcccagatcagactttggaatctcatcaaggagcgcagaaccaaggaagaagaatcccgcctggaacacactcgaaagatcgaagaagaagatctcgaaatcggtcgccgactcgaggagaagaatatccaagaacgtgctgaatgggaactcatttacggaaccggcaaagccgccgatggcaaaaccgcctcggtttcggagactgctgttgatgactcgcgacggggctcggaggcgtttgagtcctctgacaacgacagggagggtgagatcgagctcaaggaaatctcgagccccgatgcttccggtagtggttctgatggagagaagaaccgccagggtgaaaacggtactcgcgaacttgaggctgtgcctgaggaggattcatcccaacagggtcaatcacaagatgcagaggaaaagggcgtcgagcaagagggtcgatctgaagaaaaggtgccgagacctaccacacctgttatgactcatatccttggtgagggcaatgatgagtcctctgagatcggtgctgagatcggctcagaggtcggcacgccgcgctcgaaacggttctccggcagagaaatgttgaaccggatgtcttggcggctcagcaatggtgttatgacgacttcacagtcgcaggagaatctggtggctcatgatgatgccagctcttctgtcctgggggttgtggatgatctccatgagatgagcgtcggctgtccgagtgttctatcggatgcggatgttcacgagcaaacgcgcgaaattagagccgagttatctccagagaaggactcggcaggtgtggacatcaagtcaaaatccggctcacaagccatccaagatgctggactccatgtcgatacagccatatcccaggatgccgagaaagtgaccaccgaagaagtcgatactagcgacactgttcagcaggtgtctcccgtcgagagcactgttattgccaacagtccccttgagaattctggaatttccgaagtgtcggagaagccacaatcgccagaaacccccgcaacagatgttcaagcagacattccagatgcctcaaagaagatcggggaagtcaagcccaaacctacattggagcagtcacctatgaatgatgcagaagtggaaaatgtggaggccaatgaagatcaacctcctactgctaaaaccatcaaggccgagtctattcctaagtcgaaggctgcatctttgcccgagcccaaggttgagccaaagatcaaagtaatcaaaaaactagatgcgtcaagcatcaagcacatccccgagcaaacatcacgagtgatccattcgtaccggacgaacgaatgggccaagcatctcgcagatgcggacacccctgagatggagccgcttgagttcgaacctgaacccgaggcagaagcctcagaggaagttcgcgagactgcagcatttgtcgatgtaggcggtcttctccagacgcctcttactgcacaaccaccaccaatcgtgaacagacctgaatttgatgatatggacaatcaacaaccatacatctcatcgacaccctcaccagatattccccgatcaaagacacggacaggcacgcaaggtctcagcaaagcgaatccaagtctaacccggaacgattcgacagcttcggtcaatatgctaccatcagcttttaatcctttcataacccaagaaccgggattgacgtcgatgcgctgcgcatcgactcccctgttgacagtcactactcccaacgagcccaaagaagcagagccatcatcacgctggaacgggccacctccccttctcgcaatccgcgagaacatggtccgaaaccgcatgtcctcaacatccaaccgcttcgatccctgggccgcacgcaacttatcccgacagtctctacctgatatggcacccctcgtctccccagtagcaccagtatcaccgccgctctccatcccggaagaaaaggagatagaacccgaacccaacgaggatgacatcccactttccaaacggcgcgccctgctacagcgccagacaatgcggtcttcatctgcattaagcattgagaatctccaggctgcccagtcccctatgtatcccccggcagaacccgccggcgagctgaagcggtctgcttcaagaatggcagcgtggcgacaatcggtccgcgaggaaatcacccaaaagcgaaatcctttggccatgcagtccccgcccctcagcccagctggtccccccgaccaacggcgcacatggagctctgtgcagcagatgcgcgaggcttcgtctgctcagctgggcaatgccatcgcagacggcatgcagcgtggcaacatgacggatctgcaccgacaggcaatgcgacgtatgcaggcctcagcaaatcgaaagctgtagtacctatggttcattcatttttctcaataccccttgatttggttcttttttaccaagcgttgttattacacgccatggcgaatgtgtgtttcctacgactttatgaagtatttattgcatcaatgtctataatcttatttgataatgtatatctttgcccaattcgcgccatgcaagtaatacggcctcaccgagcactgccgagacttggtctgaattgaaatgcagttcgtcatatcgcagtgcatggtgactactagggttcctattggcttttaaggggaatcggtcgtagcctatagaataggatgaagactatgactctacggagtaataagtcggaagatcttatggccaatttccgttggtaataagagctaagaggaccaaagtccctaacggtccttatgcactgcgatagtcatccctaatagtgcaatagtacgtctattagcgtttgctagagtgtgcatactaccaataaaggccgagatgaaacaagggacggtggattcatcacagtgaaaccgggggcaaacgacttgcatatcaattattatattattggacgtatatccctttcgagtctctgtcattttgatataagatataagatgcaagatccttcttcaagtctgaattccggtttctgtctatttagccagagtcgagactcatatacgccaagctagctgcttctataagatttacaaggattttgtctcaaatttcacctacaaattcaaaccttctttcttttccctaattcttttctaatatcatttctcacactcattttgctgtatgtccacatagggcactgttctcttggccgatctccatctccgctccagtttcccccctctcctttctcccctcaaaacggcgtccttaatagtccccagacctctgtcgagggaggaagaagcatactgttacccacgtggccaacaattcataaaccggcctccaaccaatcgcgcctccgtggagtcaactccgtcattcgttcgcgcccagcggcgacagtgcgttccgatctcaggcccgccgtcgctcctccgcccaccagcagtccgactcgcaaacccagtcaaccacgtcccacgaataacccccataaccgtccgcccccaacaatccgacgagagtctcccactcagcttcgaccactcacgcgacgtccaccccctcctcagcgtcccagagcgacgccgctcccgcctaagcccatccccgaacagcctactcgtcgagcgcagccagggggaaacagaaagtggccggacgagcattgccctgccccgacgacaccgtcgcagcgaagagttcacagaaatgacggccgcgttcgcgggcagcgcagcgcgcgaaacagagaacctgcgccctcccgaagctgtccacctcacacagagcggcacccgacagaacgaccgtttccgctacacccagtcacaaacttccttccactcccagtcccagtcccagtcccagatcgcttccgtcccgtcgcatactgggtacccgcatgccgatgtcgctgaggagctcgcctggggccctgctcacccctgttttccgcatattaatccccatgtgcctctcgggtcgcgggagtacctcacaacgcgcgtgattcgcatccggcgagattggatgatcaagggtgatttggcgccgacattttcgaatttgtatcccgagatccttgatccgttgttgtcggagcaggagtttcgccgggttatctctaccgtcaatgatggtgttatcaaggcgtttgatccgttcagttttcggaattggttcgatagcacgatgggtttgttgacgggctgggtatgggatgatatcaatgcccccgcgaccaaaagccagttgcagcgtgtcgaggcttggttggagaattggaaccgcgaggtcggtgccaaagatggtgttcatatctggagcttgaggcggacggcctatatgtcgcttgatatccagattcccgatcccaaggttggcattgtacccagtgaagccccttcagctgctaataccaggccgagtactggtattggggctggctcttgatggtgtcgggctgcaggcgccgttttgcttttgctttctgattgtacatctttgtgatttgttcctttactgggatctctgcatgatatccatcccgcgcgacactgaatctttcgctatatacctttcgtctttggagtccgaggttttccttttaatatttctgtgatctgatccctttctttcatatctcttctgtcagcttcatctacatatccctgattcccctggggggctactttaccctgatttcgaactgtcatcttgaccatacatctttgtccatatccggctgtcatactgcattgtcacctctagacttgctaatcctgagaaagaactaactacattgcggatttctctccgccttaatgctccctccacgttgatgttcaataggagtagagcagcccatggtccatacaatactcgtacattgagcgtttatgcaagtcagtgttcgctttgcctgcaaaacattctatggtaggttcatgcaccatcgtgatacttcatacattaggcaaaaatatcacactacaaacaagcatatcttcaagctcaaacccaattacagtccaatattcctaaattgtcgacaccgaggatagcagaaaagatccctccttcctagactcaacgcttacctcttcagccaactaaaaatgggtgattgagaagcccagtaattgattcccgatcttccggacgttcctgcaacgtcgaccaaagaaaatctgcaagcttctcagtattgtctttaccaaaatcagccggtaatctctcgctaatgtaaatggcaaatttttcattgccgtactcaaataggctgcgcatgagagacctcaaattcccatgaacctcgtcaatcgtgcagccaaaatattctaccgggaagagtggctcgtttgtagcaagctgaaatatctgcacttgatggttagatcatggtaggagttaaggatgggatagattaccaaacaccctagagcccatatgtccaccttttcattccacgaatggggttgaattaactcgggtgccctcgacgccattggcgtgacaggaagaatatcatgatgtatgttccatatagctatggtaatagtcaataatcgacattctcgcatcactaaaagggttcagacctccgcccatatcaccaatcttgactataagtgtcgagaaggccgcatcgtctagcattccacggggccgctgcgagctcataagataccgcggagcactgtcatccacttcaactcctggaagccaattgacatgactaaattcgggttcttctatcatttcgctcgataagttgcagttcagggtgaacaggatattggctggttggaggtctgttcataaatcaatattatcgtcttggtcatttagtcccgaggatacataccgccatgaataaggccctggtcgtgaagataattcaacccgagcaatatctgtttcgaaacctcacgaacataacctgggcagcgtggtttttcccgaacagtcattgctccaccatctgatatcatgactgggaacacgagacaaatatgtaagccattaggccctttgtgctcaaagtgatctaatagttgcaaaacgtggtttctccctggatggtgtgtatctactttcgataagtgaaggaggatagaacgttctcggctgctacttgggatatccgctttgagaatcttcaacgtaatatatcttccaagcctaggcacaggaaggagtaagcttgatagtcgcgggcaaaatagaaaaatgaggtgaatacaaccttgtatcttccgcaatccaaactgtggaaaactggccgaatgcccattttgcaacaatccgatacctgtggtggaaagtgtcctcgaggtgaactgggtggtagcctccgatacgatactcttcaataggttcgacaacattgtgaatgcgttcgaagcgacgcattttcctcaatataatttattcgtacaaggcacgtctgtgtcgctgggaaaacgtcggtgtggaaagcaaggaatcaatttgatatctacataatcagcagcaaataggaggcacgagaggtgggtaaccctagggcacccaatcaacttgtagctcgtacatggcactttcattataaacagcagaagcacaactgaatttccccagtaaagaaatgtgtcactagtctaaggtagtctcttcaaggcttcctggcccttctcattcaaatccggatactgccttagattacacaaatccctccaaaatgccttaatgccttggcatcttcatgtccctcgtcatgtacgcctaagcgctcttgcaacaactttttccattcgacatccataactgtaaatccgaaagaggctgcgacatattcataccagataggaagataggcagcgtactcccagtcgagtatattaacgacctttccatcctggatcatgatgttgcccaaattgagatcgcaatgagtgaggacatacggctcgcatttcggtcggcgcttctttaagttatccaacactttgagcggtagatggtgaaggtcaaggctaagagcatcccagagttcttggtcggagtgaaacggcccatgcggttcaagattgaagaatagtaaagtgggaataacatgggctatgatcgacacattcgatggagggtgatatgacagatcgaagctgcttacgcacttcaacaacttgatccgcaatagccccaaaaagtggctattgcggcttcgataacgaaggccatgcctcctcaagtgtttggccgcttatgcgttcggtcataacaaagtatcggccatcgtgatcgacccaatcgcgcagaacctttggaactgggatatcggtatgggttgccaggtaattcaagattttgacttcaacttttgcttttagaccctcatccgggcggtctttcaaaatcacatcagaaccgatggtccaaacgccccgttgagatgcaccgtagaaaagtttaaggtggctagagtaatggcactgtttttgtttggtggatgtccagccgcacgcaatgcaggcctcgacgaatgtttcacccattagagttggaggttcaacgggggtgatttgttataggtggaatttgatcgaggatgggagatggaagagggaccgatttttcaaaagcgaaggccttcctatgaagtaatcaacaccgtttctaaggctcaactttgagataatcgaggtcttgaaaaaagaaaataattggtggaagccgtgggcatggccgtcaaggccgattttgctattaagattcgctctgcccacgcgtatctatttcactggtttctaagcctcgtcgaaaccaaaagagcggatcagtatgtaggcagttttgagaatggaatcagactattcattgatgcagtacaggctgaaagttggttccagtagaggtttcgtgcgttccctaatgagcagcaaaccgaagtttttagatggcagaggaacagttacctatgtctctctccccttacatatgaaatagccattaactagttagttatagtgagctggttagttatcgctaactatataggtagttatggttgtcaagtagttacacaagtagtcaagtaagtggcacctccttttatacctcgggcggtgtcgatccaccccacccctgtttccgcagctctccaactcctatcaggagcagcaactcgactcactaaaacattatgctctcggggatcctcatatttaaccagaagggcgaaaacctcatttttcgcgccttccgtagcgattgccgcccgcgtttagccgacatcttccgcatccaagtcatctccaatccccaggtgcgctcgccgatcctgaccttgggctcgacgacctttagccatgtcaagcacgagaacatctacttggtagctgtgaccaagagcaatgccaatgccgcgctgattttcgagttcctctaccggctggtcatgctgggcaagagctatttcgggaagctcgatgaggaggccgtgaagaacaacttcgtcctgatttacgaactgctcgatggtatgtggaaaaggctcaatgttctagaaacggagcctaacaattggtgatacagaaattctcgacttcggatacccccagaacaccgatccagataccctgaaaatgtacatcacaaccgaaggcgtcaaatcggccatcaccaactccccatcagactccgcccgaattacccaacaagcaacaggcgcgctctcctggcgccgctccgacataaaataccgcaaaaacgaagccttcgtcgacgtaatcgaagatgtcaacctcctgatgtccgccacaggcaccgtcctccgcgccgacgtcaacggccagatcgtcatgcgcgcctacctgaccggcaccccagaatgcaaattcggcctgaacgaccgcctcctcctagacaccggtgagacctctagcaacatgaacaacccaggcggcggcaacggagtcagcacctcaaagacaacgcgcgccgcggcaggctccgtcacgctggaagactgccagttccaccagtgcgtgaagctgggccgatttgacgcggaccgcatcatctccttcgtgccgccggatggcgagttcgagctgatgcgctaccgcgccaccgagaacgtcaacctgcccttcaaggtgcacccgattgtgcgcgagatcggtaccacaaaggtcgagtacagcgtcgccatcaaggcgaactacagctccaagctcttcgctacgaatgtggttattcgtatccccacgccgcttaatactgccaagactacggagcgcacgagccagggccgcgccaagtatgaaccagagcagaacaatatcgtctggaagattgcccgcttctccggacagtcggagtatgtgcttaatgctgaggcaacgcttacgactatgacgcaccagaaggcttggagtcgtccgccgttgagtctttcgtttagtttgcttatgtttacctcttcgggtctgctggtgcgctatcttaaggtctttgagaagagtaattacagctctgtcaagtgggtgcgctatatgactcgcgcagggagttatgagattcggtatgtgtttatcttttcgctggtcatggttttggtcgctgactcaactgcttcattaggttctgatgattctcgaaattttgtgctgattttgggttcgtgtgggagaggattccaacgagcagtgttgatatcattggacttgagtccagtttcatcttgttatttttactttgcgcagcacattggtgtctggcgttggatggagccatatacatactggattttttaacacgtatccaattcttcatttcccgtaccttagatatatgcttgtaggagtttgaggttgagtaccatggcaaaggtttgaattgtgtaattgcatgttttcacttggctttaggtatatccatcccaaatcttagatacgatgagacgattgtcacaatagcatgcatgaagcaattgtcaaatctgtagttactatcttatacttgttcgagtgatagacaatgaaaatataagtaaagttggtagtagtagatagtagtacaattcccaaacaaacgacagtagatgtggaagaataagtcacacaaaaacaacagtatgagcaagaaaagaagcaggaacatattcacatagcccgagtagaacggaactcacagcaccggacaagcagacgaaagcaatttgtgctggtcaatagacaacagaccgaaaagaaaaatgataatacagttggtgttccggcaaagaaatcaagccaagtcaggccaataggaataaggtcggtcacaggtggtacagagatcatataatacattaagaaagacaataataattgcagtaagcaatattcaatattcaacgccgactcgagcgcaggccgatacgaccctcaccaacgagggactgccatctgggcccaacgtggctgcggcccatttggcgcgcgcactcgtcccagtcttgttgggagaggcggaatttcccgaggaccagctcgagaagatgttggtcttcttcggcggtccagtcttgtggagccgaaggagcacactcgtctgttacctcgatggagggcagaggcgcgtctgggtcgacgcatggaccagctgggatgtcatagtccatctggcgacgaggaggagagggaggagattgggtgacaggaggagaatgtagggagtaaaagtctgtggaggaaaggccaagaggcatatcggaggggacgtgacggcggcgtttgggagtcgcgaagcggttgcgccggcgagtcatctccgcgtcgctgtcatcgccatcgagnnnnnnnnnnnnnnnnnnnnnnnnnnnnnnnnnnnnnnnnnnnnnnnnnnnnnnnnnnnnnnnnnnnnnnnnnnnnnnnnnnnnnnnnnnnnnnnnnnnnnnnnggggggcggggttgtgggcgggcgcggcgggcgggtgcggatggaggaggagggggtgtgagagcggcagttctgggtggtggtgtttgtctaggggagaccgggcgtgcggccttgtgcgatcgcggcgagcgacggggtgtgttgagggggagggggctctggaggcgttgagatttcacagatcgcgatgaaggtgtgggcgatcggttgagtagagattgtagtgcgcggcaggtgccaagaagaccgttgcccgatgcaaatcctgtgccggatgggggaggagttgagaataggcggctgggagtgaagcgagacgactggcgcacatcgcatgggagggcggatgggagaagcatgattgtagatataaattgaatgcgcggtttgagtggtttgaagttggtttgaagatgaatgggatcaaagagagtcaacgtcgagttgttgcgcggtcgcgcgatttgtgggtaggctgtgattgcgccggaggcggttgcgctgcgcgacgaggcagttggggatgcgaaaatgaatggacgatattgttgttggaatgcgcttcaagttccaccttttccgggagatgcgacagcaatttggtgatatggatgttttgacagtgagtgtgtagggagaagaagttggagggggaatgcggcgataaaaagaaaattggggccgcaaacggtcaagcgaatgatctcccgtgcaacgtcaagtttatttccggccacaaagaatgtgttcgatctattattgacttcaacaagctcaaaggaactatgaaacagttgaaacagttggcagagttgattggaaaaagaagggaatgtgagagacagatctcagggtcaacgaaagtgatgaaggagctgaaggagctaatgggaggagctgatggtaagaatactaggaacaggaatgaaggcctctctattatactatctacttgaaggacctgaaggacttgacattgtagaccagtgaaacagtatactaaggagtctaggacaagagggattacatgcaaggcgcatacaaagaggactacaggcacgaggcacccctgagacactttttccaattacacttcctatttaggcaacagatcgactctgtgcacgattttctttgaatttgtatagtatgatcagattgtattggtgtattgcaatgaagtcagagcctgtaacatcaatggcttagggctgtataccaagtatccaagtacagccctggttagacgcgatcataccatttctttgatttcctgatctcatcattgccaccgggggaagtcgcgttttaataatgatctgaaagaggaggttcccttcctactattctcctacttctcctacccttcaccaggagatttgttccctgccatgccagccctctaggactctaggactatagggcctctgaacactgccacttgtgtgatcctactcatagaccttgtaaatagcttagtggcatagtggagtggaatggtggcttcataattttcagcgcgttgacgcgtctcgcgtttctcgtgacgcgacgcgacgcgccaagactcatacgtgccctaacggcgtccatactgtatagaggttatagtgaatattactacggagtacagcatgtatgtgaatacacggaccactacggagtactcgtgggtcaatgcttagaatgccatgtgccctataggatcaaccagggtcatcccactcgggggattttctatactgtactgtaagaaattccattgcccttgcttctccttaccgggtttactctggtcaactcgtgcaaagatacagcttgcattatcttgcagagctctgcatctaccacattgtggggtgcagactggctgcacactgcgggccgacaagcattctacagatagacttattgcgatacaagcagttggtaaaggatattccagttgtgcctatcgaaaagggcgttgtgtctactccttgtaacccagcttgactagaagggctgacagcgccactagacctgtgatcattcaaagggactcagtacaataccgagtggagagccttcgaaatgttccgcagcctccattccaagacccgtgccccagccactgatcaaaatccaatctcatgcaaggggtagcccgaggatgaaactgcttccaccgagaatcattcatgagcacaaggctaggcttcggtaacatagggtataggagatacagagtccagcgcaacgttagaataaacacaaagcctataatagacgagcgtttctaatttccaacgctttcgtctcctaactatccatggatcgatgctatctaagcttctcctgcagtggatcctgcggcgctaatgcaagacatacgccccttcccacgggcctcgatgtcgatcgtctccacattccttcaatcggcaagccctaatgtggctgggactgtacttgccatagggcaagatactgaggtctcacacgttcacctttacggcctcatcgcctcagacatcgctcaatatggtagtgctcttgccccatcatcccctccctgtcttactttgtgggccaaagatgtgtggtttggctggcgatcaccccctaagatccgggtcttctaccgtacatcattgattatcttttctttttgttgagaatactattacagctgacaggaagttgtgattgggtctagggactgtgttctacggcctcgtctcagagaggctgtagtaccctaccgaggctcataacacttgagtcaacctcccaatcgcctgaccaccaattggcctgaaagtgagaccatctctccgggcttgctaccgatcagcactccctatttctgtatcgaggtctacccctcttctctacccccctgccctactgctagtgctctcatagtcacacgataagggccagggataagaataaagaggctacccaagtagaagtgggctcattacaccagaccctggcttcatagcgcccaatggacggtggaagccctcctccctatccttatccgtgtggtcccaggaagagctattgttagctcccctcgctccctcctgtcctctgtgggtttgtatgcccgaaggatcgcgaactattgcaatttgcctgtgtaacttgcttcctagggatggtcattgggtgacgatgaagtaacttatcgctttgcgtggattctccccgatgatactggttccaggttctcaaactcttaataatcttccgtacttgcttccaagtagagaacttctaggctcattgctaggaatattggcggtgggaaagaaatgctaacgataattattttcttcgccccatggcgaacatagagccaatatctacttgggaatggaatgttcatggcaatagtcacaccgtcaaaacttcaatgctcaaagggtatccaatatagcctcattgaccttgcattctcttaaaacgctcctccgcagccctcgctctgcgctctctctccaatcgcatcctcatctcaggcgtcatacctctagtctcttcatctctcctttcggctgcagacttctcaacggcgcccacagtacgaccgccagacttagtcgttctcggcttcgccgccttctcggcctcttcgcgttgtaggcgatccaagctagccttgcgccgggtagattcttcctcctcggctattttacgttctttctcggcccggctctcagcgtcggctttagagaccgccgatggaaccttggctacttcccagtcccattttgactcgccgagatcgtgacgggcaatgcggaaggcgtcgcgcgtggctcgatcgccggtgagttcgaatggagttctgccttcgttgttaactgccgttggatcagacccggcttttgtgaggagagccgtaactacggctggtgcgtcgaggtttgcggcgaggtgaaggagtgtagggcaacggaagttttgtggcgagtcggcgggcgtaaaggtgaaagaagaaggtatagagttgtttgagatataggacatgagggcgggaacctttgagcggcgaatgagcgcctgcagttgggatgtgtgcaacaaggcagcttcctcttctttcgagagcttcggcttctgtggttgcggtttttggacgtgtgtagatgattttgactcctgctctcgccgcttggcttcagccgcagccagtgcggcttcgtccacctcgctgaccttcattctggtcaactccttgaaggaccgcataagttccccttgagtcgcacggcgagtattgaacgggaaccctcgtaatcgggggtcgttctgcctgaggacctgtccgtcatattgaccgaaaagagtcttgcgatttgtctttccggtagctcggacgaacaacagctcggctgtgtcaatcatatctttccactccgacaacacatctctgatatccttctcaagtgcagcctcgttgtaccggcgcagacttgaacctgccgaatgggcagcacgacccgacgcgtcactggcagactgtgagccaccctgctttcgccgtgtcgtgtatcggtggaacgttttgtgcgcaataacccgagcctgcctgtcttcaactcctccttgctttcggtgaatctccggtgccagcgaaaccaacatagccgcgaagtggccaccgccgatcatgcacatgaaaatatgcgggcccgaagcagcggggtcttggacgttacttgccttattggtgcgcgctttgactggcgcaagctgcttccgtcggagtgtatcaaccaggtgagcgggctcgtcctgctcggcatttgagaaaatggccctgtagacgcctagggacttgtttgatggtaatcccgagctagacagccagaatatggggtgctttggagcgattggtgtctcagtcgcttccggatcctcgttcgggtgagacagcttggcctgcttcttcagcaaggcggacagcgttgtgcccgcggccccctctgcatcatcctcctctgtctccgaagactcagaaccagatatagactcatctaactctccaatcgccttcgcgaattcgatctcttccagaggcgcattcccgcgcagctgggctttgatgttataccggtgatggtccgagcggacatggctgcgctgttcctgtacactgttgtaagagaccctgcagagggagcataggttggaggttgcgatcgcagagtcctgtgcagctagttcgaggtctatcggagagggttcgggttcttgttcggcgacaggttgactggtcttggccgttaagcttgcaagaagttctggcggcagatcgtagactggaaagatcagcgaaatgaatcaacgaccatatagggcttcggaggcgtaccataaagaggccttttcaggagctcctccatttgagtcgtatcgaccatgatgggctggacgaagaatgtgtattgagatcgtggtgcccctccaatgacgctgttaagtgggctcttaccgcctaggagcaatgcagtactatgtggactctatgcgcttcgctcgcttttatgaaaagatgctggatctgcaataattttgagtcatgttgtggagctttgctcagcctcatttaggtccctgagagcgttcattttccatattaattccaggcttgtgggctgtgctcgcagatattaacgagtcggcctcccgattaggaaatcaaacccatggacatagtcatatcctcggtattatgtttgatacctttgtagggcatgattatgccgatgattctgattcttttccctaaccctatctcaatctatgttatgcaatcttttcttttctagtacctgtcgtcatcacgtgattttcgaatgccgtttcagaatcacctcgatcaatggcctattagccttattagtacacaaattcagtccatcaccgtttttttgcctgttctgtaggatgtccgacttacatgctttgcaggtcgatttgttccttttggtaaattctctctgcttgttatggtacatgcatattttaacaacattcaagggaaaatggcaagatgactcgtcgctatcgactgatagccaacgaaaacccttggcccctgttttatccagactaccacatacagctaatcataaaccgcatccacatcgttgataaaacagcgcttgcttccgagggccccgacacagggaaggttcttgtggtgtttgttgacaagggcggacgggcaatccactattctcgcctagagctaaaggatgcagcggatattgcatatctcttgaatttcatgcttcaagaacatgggtgttgggtcaatgcgcagattggccaatcctatgaatggggggcgcccttgagaccccctatggcgagaatggtgtgaggtgaagatacccaagcttcacttcacttcagtaagtctcggaaactagtcacactccttgaataccagagttaccagggccgggtaataagaaaggtgagtctccggtgatagtagtctaaacggagacctcaagatgcaacgtggaaagcggattgaaattggaggtgtggcgaagtcataatctaggcactggaaacccatggataacatcagcaatacctaagggtagctcctacacgggttggcatgaccaacgtctcttggccaatggcatatcgggaagtgtccctaggagctgtgatatgaggaagccaaaagtcttgataagtaatcaactgatcctctacccacagacgccaacgaccaatttgcaggcccgcagaactcgagtcgtggattgaagtgagtcttgtgtaagaagggtctatctccaagatagttcttcctgcaataccttgctcctggcttgatgcctgtcgactcgtacgtgtatagcccaagattattccattcccaccggaaccaggaacaatatttgctatcttttgtgcgagctcttgggcacgtttttgatatctgaatttggtggaaatgccaaagtactgtcggtcccaatctgtagtgaagggtgtgaggacgaagactttgggcgcgtagattgcattcaagacgccggggttatggtcggtcccaatcagagcagttatagattgtgcatataatgtcccatctcggagggacttggatgcattcatcgtgaacgagtcgtcgtcggttggattgaaagctaggtcaacgaacacagggctttcccaaatgtgcgaaaggtacacacccttttcggatgctataatcaccactgtacatccgtaaatgccctttactcctacagccgagtgaccaattgatggatagttaaaccattgtgcagacactggtccaggctggtcaatccaaattggcgccaagctcttgacatagctgctgtaaggaggagaagcgtcctgggaagcatatgcaatcaacgaactgatcatcattttctcatcttggctgctagagagagttgtcttggagacaggccgtgtcggacttgcagctccactagttgtagcaatctcacaaccctcggctggtagaatagtggtaatatccgttgggatcgactcataatgctcaatcatggccgccactcccatgctagcactacccagaaggcttgttctcatagagctcaacttttcgcaagtatcgggagggcataatactggagtatcacttgtcgaggtactggaaaatgtggttgctgacccagcgacagagtattcaatagtggtagcggtagttgaaggtaagcaggttgttgttgaaacagtggaattggtgtcagaagctaatggtttgagcatcatccgtatcgatgccatctgaaacgaactccaacggcacgtccaggcgggacgatattgctgcatctgagtttttgatagaggatgtttctcacccaccgtagtggtgtatagcattcctcgactgcagcaatatcgtaaagctaagacagagaaatctgtggacttgctacccaggctaggtgggtagtggtattgtggcggaagcaatattcccagtgttggtacttgctgatgagatctcactcgataatgaagcaatggttttgctattacttttcgagcaatgtgaatttttgcattgaatatcttcggttctgacagaaggagtggcagagtagagaaaggtgtgcatctcatgtcactgatacccaaggtggtaattatctggggactacgctattatattgaaagagctatatgcagagttcctattgaagacaatgacaataaagtttgtttgcttgggcttacatacaataggattgtgatcattgtcataaagcacccacttcctatcacttagaggctaataggctttacactttgggttataaacagttcatctaatttaagggtgtattatttgaatcaagaaagaagggtttctgtctaattcgtaggcctgtcttcctggtaagatcttggtcctaaggataacctcgaatacggagtagaataatgctgacaagtatattcatcaactgactgcgaatttagtgtaatagggtcaattgatttagactgaagcttgaattgagcagcgcctattagtgtgttaattctcaagacacgtacatcgcctagttagccgcttgatgtttgtctcgagtctcgacgcatattcaaacccgttcatcacatgactaacatcacaaggcccatgcgtctctttggcaaacagccgccctcgtcaagctctcatcttagacaaaacccaatatacagaaacgagaatttaccatctctgtgggaaacatgtcttcaaaacaacagcgtcaacagcagctaatgctaaatgcacgccaatgtcagatgcagatgatggctgctaagcaacaaccaagcaccggctgcaacagtggcaatcctctacagcagcaaatgcagcctcgatcagggacaatggggtccaaatatgatgacctacccatactggagcccactgatgttatctttatttctgaagatcctaagtcgactggtctagttcccgccttcttcggatcttttgaatccgcctgccagcacggcaccctctccaccattcagtccattgtctcatccaagaacctcacacctgcttttctccatcatggtcttacacgtgctctacgctccggaaatattgagattgctcgctatctcctagatagtggcgcaccaatagttcgcgaaactccaagcaatatcttctttgtacctttggaacagcaaattgccctctttgagctctttacccagtataattggactcccaatacaccaggctactatggtagtgtcctgctccctcgaattatcaagaacacccctcttcttcgttggttcctcgaccacggagccaatcccaaccttggggtgcagcagaccacccatgacaggtgtggtgggccagatacttcctcgtgtgctgcacttgaggcagctgcagctactggaggagttgaggctgtgcgtatgattttagatgcgggtgctaacatccaaaacggtgtaccactacactacgccgccggggcttgtcctcccggtacgaatccacatgctgggaaagtggtaccaagccgtgaatttgatactagcagaattccagtgatggcactactagtcggtcgcggggctgatgtaaatcagagagaagagtcacgacacatggtcgcgcagtatgcgattgtatatgcggcgatggcaggagcagttgagcgggtcaagtggttgttggagcatggagcagatccatatataaaagggaactggggcagtgcagctgagtatgcacttacctcggggaatgaagagataacaaaggtcattggggaatttaccctaaaaaaagcttgaattctgcagttttgatatagcatcaatgaggaaatatattgtgctatcatgtttcgaaaaattggttatttgtcgaagaaaggatacgaaaccattaatataaaatatacaataaacacatcaattttgatgatttgaattagcgaccagctttatatgctgtaaacagtcctttgaagccatcacaccttcctaagttggaagacaaccccgataagccgaaatagccgcatcggtattagtgcgcttatccccgaggattacatcattccaggtcacgtgtgaggtctgcaaaatttgtatccaggaatgaagcgtctaggaagatatacggagtagtcaattttatgttacgcaagtttcatacaaggactccagagaaccctgcatgtgtacattacggtgtaatccatgagttcgactccataggctctaatgcgcacggtaaccagccccgattttccccattctgaagtggagcgctgcccgttcttgcttttgtaagcagcctagcttggaccaacacccccgttttcttctagttctccaacttcgtatcttttcttgcttgtgcatagaaaggcataccgagccactaagaaaaaaaatgctggatggccaatcccaggcggtcctagaggcgtcccgcccggggcatctcttgcattcccttggatcggcacttgattcgcggcgacagcctttctgcacagatagcgagggctggggcccgctcagctcatcgagattcgacctgacaccatgctttcttgacgtgattgtggcgatagtggcagtttggggtacactgagtggactagcagcgttgtggttattattgtggaagcgggttccgcagcccgtatcgaagaattggcacttctacaccaagttggttagtacatatcggacacgcgcgcacacttgtggacgttaatttactgactggtgtttttgtcatcctaggctgttcttgccgctctcatcattgttaccgcccttcaagctgcgattcaagtcgaatcagaacccaaaatcttctgggccgattttcgcttctggtcctccatcctgaccatcatctcgctgggggtgataacttcagtgcaatattttgaacattggcggagtagacagcccaatggggtcgtcctattttactggcttttcttcatcatcgcctacgcggtcaaactccggtccctgattgcgcgcaaagaatacatcgaccaactcccttactttgtctgcttcaatgttagcttgggactggcactctttgaatttgtgcttgaatatttcgtacccaagaagcaaagcgcatacgatgcgctgggagatgaggatgagtgcccctacaattatgccgatgttttctcggttcttacctttggttggatgacaccgatgatgaaatatggatataagaactacttgactcaagatgacctctggaatctccgcagtcgcgataccaccagagccacgggcaatgccctgcaggaggcatgggatgaacagctcaagaaaaaggagccgtctttgtggacagcactcttcaaggctttcggcgcaccctatgtgcgtggtgcgataatcaaatccggaagcgatgttcttgcctttgtgcaaccacaactcctacgacttctcattgccttcattgagtcgtatcgaagcccggacccgcagcctgttatcaggggtgtcgccatcgccttggccatgtttgttgtttctgtctgccagacgagtttcctccatcaatatttccagcgcgctttcgacactggcatgagagtcaaatcagcgttgactgctatgatttatgccaagtctctgaaattatcaaatgaagggcgctcggaaaagaccaccggtgatattgtcaaccacatggcagttgatcagcagcgccttgcagatttgacccagttcggtactcagcttatctctgcgcctttccaaattactctgtgcatggtctccctttaccaacttcttggcccgagcatgtttgccggtattggagtcatgattctcatgattcccctgaatggtgtcattgctcgaatgatgaagaagttacagatcatccaaatgaagaacaaggactcgaggacccgattgatgactgagattctgaataatatcaagagtatcaagctctacgcctggaacacagctttcatgaacaaactcagccacatcagaaacgatctcgagctgaatacgctccgcaaaattggagccactcagtccgttgccaacttcacctggcagtccacccctttcctcgtgtcttgctctacattcactgtctttgtgttgacgaatgataagccattgaccactgagattgtgttccctgcgttgacgttgttcaatttgctcacattcccgctttctatcttgcctatggtcattacgtccattatcgaatcctccgtggctgtgaagcgattgatagattatttcaccgcggaggagctgcagaccgatgcagttattttccaagatcccgtggcgcattccggtgacgaatctgtccgtgttcgcgatgcctcatttacctggaatcgtcatagtgggcagagtgtgctggaaaacatcgattttagcgcacgcaagggcgagctcagctgtattgttggccgcgttggcgctggaaaatcatctttcctccagtcattgctgggtgatctgtggaagaaccagggagaggtgatcgtacgtggtcggatcgcgtacgtcgcccaagcgccgtgggttatgaatgccagtgtccgagaaaatattgtctttggacaccgatgggatccctcattttatgaccttaccgttgaagcctgtgctttgctcgatgacttcaagaacttacctgatggtgaccagactgaagtcggagaacgtggtatttctctttcagggggacaaaaggcacggttgactctcgccagagctgtatatgcccgtgctgatatctatctcctggacgacatcttgtcagccgttgatcagcatgttggacgtcacatcattaacagagtgctcggcaaaactggtctcctcggtggcaaaaccagaatccttgcaacaaacgcaatcactgtattgaaggaggctgacttcattggcctgctgcgggataagaccatcatcgaaaaaggaacttatgaacaactaatggccatgaagggggaaatttccaatctcgttcgctctacgatggttgactcggacgatgaaggtactgccagtgggtctgaagatcttgctagccccgaaagctcagtcacaacggccatcatccaaaacggcaatgcatcggatagcgaggaggcggaacaacttggtgaccttattccaattagggcaggaggtgaggcccgtagacggactagtaccgtcacgttgcgccgtgcaagcactgtgagctggcaaggcccccgccgcaagttgggagacgaggagaacgttctcaaaagcaagcagacgcaagaagtttcagagcaaggaaaggtgaaatggggtgtttacgctcaatacgccaaggatagcaatatcatggcagtcgtggtttatttgattgccatgatggctgctcagactgctcaagtggtgggcaacttctggttgaagcgctggactgagtggaacgaagcccatggaaccaatgctcaagttggcaagttcatcggtgtctacttggcgcttggcctgggatcatctctcttggtcattgtgcagaacttgatcctgtggattttctgctctatcgaagcatctcggaaactccatgaacggatggcatttgctatcttccgctcccccatgagcttctttgaaacaacaccatctggccgcatcctcaatcgtttctctagtgacatttacagagtcgatgaggtacttgctcgtactttcaacatgctattcgcgaactctgcccgtgcggtgtttaccatgattgtcatctcggcagctaccccggctttcttgctgttcgtcattcctttgggttatatataccttagctaccagaagtactatctgagtacctcccgcgagttgaaacgtcttgacagcgttacccgaagcccgatcttcgctcatttccaggaatctctgggcggcatctcgaccattcgtgcctaccgacagcaggatcgattcgcccttgagaacgaatggcgcatggatgctaacctccgggcttacttcccatccatcagtgccaatcgatggctcgccgttcgacttgagttcattggttcaatcatcattctcgcatccgcgggacttgcgattatgtccgttgcaactggcagtaaaatttcgccgggcatagtcggtttggccatgtcatatgctctccaaatcacacagtccctgaactggattgtccgccagaccgtcgaagttgagactaatatcgtgtccgttgagcgagttctcgagtatgccaatcttccgagtgaggcacccgatgtgatcttcaagcgccgccctgccatcggctggccggctcaaggtgcggtggagttcaagcactacagcacccgctatcgacccgggcttgacctcgtgcttaaggatatatgtctcaacatcaagcccaaggagaagatcggtgttgttggccgaacaggtgccggaaagagttcgctcacgctggctctcttccggattattgagggtgttgaaggaagtatcaggtaaggacatatgccatcatttgcctttgcgcttttcaagctaacaaaaatttagtattgatggacttgatgtgtctacaattgggttgaccgatcttcgtgggcgtctcgccatcatccctcaagacccggccatgttcgaaggcactttgcgtgacaacttggaccctcgcaatgcccacgatgacaccgaactttggagtgttataggtcggtttaacatattctattcaatttaccgccagcaactaactggtttgcaataaatagatcacgcgagactaaaggaccatgtctcgaaaatggacggacaactggatgctcagattcaggaaggaggtaagtgactgcctgcatctagacattgcctagggcatcccgttccctaacacatttctcaggctccaacttgagtcaaggccagcgccagctagtatctctcgcccgtgctcttctgactcctagtaatattcttgttctggacgaggcaaccgtaagctaatcctgcctttgcttttgaatgacagattcagctaaccatagcgataggctgcagttgatgtggagacggatgcgctgctgcagcgcaccctgcgcagtagcatcttctctgaccggactatcatcacgatcgcgcaccgcatcaacacgatcattgactcagatcggatcatcgttctcgataaggggcgtgtggctgaatttgacacgcctgcagagctaatcaagaagggcggcaaattcttcgagctagccaaggaggccggcctgctcgacagcgatggtggcattgcctactcgcaatagcgtatactgcaatcgcctgcagtggcctcgaatccccgcgtttcctgttctggcgaaaacatctctcagctagccagcccatctgagaacattgaaccagccccatccatgcagctctgattggggaggctggatttattttttggcacctcgggccgatcttgggaggtcccggatgctctctcgctttcttcttgcaggggtcacgttgccaacagatcgttgctgaccgttcaaagagtaggtggtcctgaatgtggcgcaggtgaccgtgcatatatgcatgtacatggtactgaagaaaaaattttcattgcacagttcaagggacccccctgaaagggatggacagacatgaaaaacgttggagagtggctcaatggtgcaatctgccgcgaattttttttttctatgctgtcctcgagtctattgttgtttcatgttgggatggtgtttgcctcgctggtgggtgggtgggtgatcgaggacatccgattggatttgaccctgcgaactaaacgataaaaagtgattccctttactccgtacattagctttcttgtttgccttgacatcttttgatcaaattgtggccgtgcacagcgtgttgatatctactgaaatagcctgaattcctacagcgggcattgcctagacccaagcagcaactgaaacgtaactatgcattaaacttaattaacacacagctttccttgactagggcatcgtctgcgatggttatctgcagtagcgtctcgtactaaacgtggcggtgtcatcttgatatcccatcagaagagcgagttattgtagcggtgaacggtcagccacctggctgtctatcaagggtgtctgttcgcaggcccttggggtcagcaatataacagaatgtcagctctacttatctattagtgatactatttagcgaagaggacatgaagtcaagattgtcgaatatcgacgcacccagaccctcctccgccacatgagccccccttctctctggttcgacggtcacatcctgagaatatatctccggggcaaaaatagacatgccttttttttttagatagctacgtatacgaggtgtacctccttgctgcctgcaaaacagactctccacgcggtcgttggaattgtagtactccgtgtatatgcatgtaaactgtacagataatgaggtgggttatttgcctcggtggaattccttgaaacatccgagatagctttcaaaatatatctgccgacagaaaagagaactaagtttgcccttgagaggggcaaagggaggggcaatgacagcagtctccattttgatttgcatgtcaaatgtttaatgggctttcaagtgctccgtatgttgtaatgattgacaatttcgaaacacaagggatatcacagtatatctcgcgtggagaatgaacgatcgcatggcattatcgactacctcctaccgaatctaattggatgcggacctgcgttcgtgatatgtttcagctattcagatcccaggcaagggatgtgtaagatgacctcaaaaaacccgctgcatgactgatctctctgtgagttccgggggacggcggcactgcttccttaatcttgtttaatgggccatgtcatgatgagccaaccagagcgagacaaatcgagatctccagatcgcgaactactacccaggttgtgcacgtcgacgaaagaagtaatggtccttgtaaaagtagatcgatctcgcacggacaacgcaaagatcaggttttccggatagctccagccggggaagagttgtgctttcctagcggatatggatagaatttgttttgctgctatttttgctgaatttttgtgctctacgccgtatgcactgttatggactcatggcatgcattcgtccgcttcttcctcttttggcccccagcccgaagcctccactcgaaaatggcaacagccattccccgaacgagacccgatgtcaggatccccgcttctcagcaggtcgatcgtacatagctatgtacacgtacggtgctgtgcatcagtggcgagtgggaagctgattgtgcgacaccagcctgcgagagctgagcccgtttctgtatggaggactggctgtcttgagcactatccactatgcacactaccggcgcaccagcggctccagctttacacatatgatggcaggaacctgaaagttggaagtctctttccggaaggtaacgaaccaaggcgttatcggtctgcggagatactccatcttcccctctccaggccagatctgacgtgacatatcgaaaggatattaattttcgtggttaattcatacttatttcaaaaaaggcccaacggcttgaactgcatattattggttgtacaataatatatcaaacgtctggtattgagacagaatcggggaactggaacgcctgcaagcctccgatcgactcagccctgaggggaagagcgggaacccacagacacaacacaccgcgaaaatctcatgcacgatgcacaatgcaccgatttcagtcctagactaccaatgtggcgggattaggggttcagttctcccggaggcaaagacccgcctcgggccacaacaggaagtggaattagggccatgatcaccgagggaaataccagagacagattcgaaggtttggattagaaaaagtcttttcgggggttcgtcttaattagctctatacaacacagatggggaacggaacataatgtggatagttccttgcgtcgaacagttcgaaaatgagctaatctaatggagccggtgggaatcaaagtggcaccttcatgctcgtaatggcctttcctgttggagagctacataatcagacagaacgcaggaaggcctgcattcagtagtccgtactccgtagtaataatggcatgcacctgaattatggggcgaatggagggtttcaaggtatttgtcattcccaggccccacaagaacgctttctcttccccagccacaaactcgcgtggaagccgggccttcccgggggggaaagccctatgggtgggattgaacgggcgaaagggatcttgctagttgatccatcgtgcctttcagtttcttcaccgcatcagatctccgccgaatatagtagatgatcaaagtctatacactggcatccgtttccagcctcaccactcgatcggaacacagatctccagggacgatcgcgcggatgctgcttcgggcaatttgtccgtctttgcaggcgacggggaccgaaatggtccacttgtgaagtgtttggggtggtggtattggcccgcggatcggagataagcggacactagagactagactggcaggctagcgtgattgctgggaatgagatatatcttgtcgattgggaaagatttggattggtaaacgcgatcgcgagtgttaggtttctgtggtggattcgtcttggagatttggggtcgagagtggcccggggaagattttacagttccttagctgagtttacactatcaacgcaaatgaactgcggagtagccagtgccagtgcacgggaagaattgtgcaatgattggctgtgggtgaaagttgagcgaaagtatgatgcaaggacctcttaaggcttaaaaagattccgatggattggacatataagccacgtctccattcactcatccaggtacttgggactctccaagatctccagccttcgaaggttggagtggttgactgagtcattgggtgtaccccacttggcgctgttgagttttgtggctttgtggtaacttcctgctgaaccacggaactggatgagtttatcagagttcaatccagagcttcatccagagttccaatctagatatggttcgaactatggaagcgtcgacatttgatagaatagttcgggcttttctccccttacatatgtcccatactctattctatgcgggtgatttccacgttcccccactgaggcgatgaggcggccggagtaattttccgcagcaagggtgcctcctgactatcccagggctaagcgagacccggaagtggaccgcgaacgacccattggagaaaattcggccaatctactcagactaactagatataaagtacgaatcacgccgccacctgccaaggtggatgtcgagattgctcgtacatagatagactagaccgaaatgatacagtctcaggggttaaggtaagtcttgcatgtatacggagtaccgaggtccatagtcggaaatttactctattcgcaacacaatgagtgaccaacaataaattgactgcagtagcgttgccccgactcgtaggaacaccatgggcggcccttcgggccgtgccacaatggagagatgattcgctgctgtttcacattgcttttgtttcttcccattgtctatccacatctctattgcaaacagtagagacagaaatattgcatatccatttggaatgcattaagttatcgaaagccatgcatagaatgcatattcgtaatgcttttcgacttacaataagataggcgacaaccttccaagctcggaatgaatgctcattgggattggctgccctgaataggaatgatgctatgatcaacaccactatcactagggcacatgagaactggacctcgtttacgaatccagatgtaagcatgactcggaagacctcattcgcatctggacaagccatcgcttcctgaaaccttagcctggcgttatcaaaagtggtaattgaatcaaccgaagcgaggctcgtttctgcaccaattccagcccactggatagagtctgaagggctctatgatcctcaactttgacctttcccttgggatagtggagcaccagctagaccgtatccgaggtttgacagctttagtttgaccggaccgccatccccggcccgccccagtctagtggcttggtggggaccagccggggcgagtctgggcctcagggtcttagcgagattggacatgggaccaaaggggatactccacagtttaggaaagagacatcgtcggacgatgattggccgctgtcaaaagtacaagcgcgaatggcacttccctgctaatcctaaaatggatacgacatcgttgtctggggagtcctttcctacgggtcccggcttcggccacaaaaacgccccgataaagaggggggacgctagatgacgcaatgccagtgcttctcagttcgatcgtgctcgatcgatgcgcataattgatcgatcgtgcgtgcggaggcccggattcgtgcaatagacctgcactagtcatgtgcgattttgctccgtcccgaagatcaaaatagggtgccggtttgataggccctgacgtgcctctaatacgaggatattttagcgaatgcagctatctcttgcccgactaggaaacaccctcctttcacgcgtgcaggttgcctctcaacggtatctttgacatagcacatagcacaccgatcatgcagcctccaaacgatattattgatatcgagcagactcatactctgtatactcccccttttccccctccgatcgcttcggtctatactccgtacgattggatcatcgagatttgaagggaactatacatgaagcagtttttagttgctaaagcatgaaagaaggcgtttaggagttcctttgtatattctgtttgtatatctgtactacactcatggcggtgaaataacctaaagacacaccctagtccctgtaatcagcccgggagtttctctagcgttccagaaatgtgcgacggacacatacatgaagtcgtttggctagatcgacaatccccaaccccgaccaacccataccaaccccgatcgtgtgatttgttgcagttctccccaatattctgacttggaccccactcagttatttccttcccgtcaatgcacacccgctgtcacaatccgccgagtccgggccaaagtctacgcctcattttgaggtttcagggtaattgcatcaccgaacaactccgctctaactctttttttgtacttcgtagtgtcagcggtaatagcggtcatcttaaaagttggcattgataaaatgtcgttctgaaactagtgtgataaggaattagaaatgccaagctgtcaaacttggtgacgttttgtctggggacaaaactcttacctcgattaaggtccagggaacatccatgaaggcttctttcctgtttagtcactgccaaacagtgcaaacattttgcctcccagtttccaccgtggacctgccatgtccctgtggcagtgcccaaaataggcgagccacgttgtgtggctggtctgagcttcggctaaggtaaattgtagggatcaccagttacgcgacccaatgagaagctttcgtttagaagtgtcaaatctttgatgatcactgacataattgtttaaagaaaaggggggtgcatctggaatctagacctccaagacattgaaattgaatattgcaattcggagtttcgaggtagtccgtagtccgtacatacggagaacccgtgatttgaaatgcgactagggctttattatttatttatttttttactatcctttagagggtgttgtagtgattcgcacgctcaaaagaccacggctaaacgccttgctaggaacagggaatgggcggcacaaacaaagagatatactatccggggatgttatcgctgaagccgcaggtttttcagatactggatcgagtatgggagtatgcctagttttacgtctttgcgccctcaaagaatgacaaataacgtatagagtaactactccgtgatcaccgtttttctagaactgtttagttcaacgatattgctttgttctatgcctcgcggtaacttaaaaaagatgggtttccgaaggcactgcggctctattgctgtacgtactacggagtagacggcacggcaattgaatgccatgtatgtacggagtttcaatgagatcgatcagatcgatacaatcttcatacgcaatcagattggagttgtttgtgctagaaaaattctgcctcttgcatcttccccgataaaggaccgaggaagtatgtgttccccttttgccatgtcaaaacagatatagtgttttagattctcccttttttaagtagccctgatcgaggtgggtatccatcttctttgtctgtagtttcaagacctacagtgcaagttgtagcgttatcccaagaaacgccagtgtaatccaccgggacgggagatggacgcgttgacagaatcctgggttaccgagtttccccttcccctggactcttagcacggacccgggcggagagccaggaggtctgctgattggtctgtcacaaaatgggtcggacgtcaaaaataccgccactaacccgccatgggatagttcgtcgaactattttgcaaccagttttcttccccgggggaaagaaagagtagatcacgccgtggtgttgggatttcaaacactacattatctcgatctgttctaggtcggattttgaatttattatagcttatcctcgcggataaaacggcgtaggcgagctacggtccgtattaccaccgtactttttgatttcccctttccctccgattgaaatgacggatttggtcaagattgatttagatcgatttggcgagatttgaggtctgatctcagggggcttttaagctatggattttaggtgctatactcagctgaagccaaggtctctgattccagaaacccactgtgtttggcttgccaccccggagtacggagtaggtatctgtcaatgaacggagatcgacagcagcaacaagctccagacggcaatgaaaagggaacagtgacatattatcggcgagtcatctcccaggatccaggatgatgggccatgcacaagccggatcttgataggttcaccaagaatggggaaagtgtggattcgttcacatggttggctgctagtgtcggggcactttggtgctgagatccgacgatcgagaaacacaaaaagaaaatgttatagataaatcccagtcacaagcaatgagtaataagtaatataatgtaatatggcggaataatataggcatcattatacacttttggtcctctatcaacatcgatgacaaattacttatcgaaccggagcctccgaaaggtctgtaatctgcacattaagaatagcacccacacggcgtcaaatagggcctgtgcgtctccccaacgggggcatttgggtgtgcctgacagctagacgcgagtgcttagggctaattgtgtcgtgttcgctatgatggacatatctgcgttgctaaggtctaggccaacggttgcctcgtatgccaatcgtaactgactgcgcgatctgatcccctcggttttgagtcttccaactgacagcaagccatgagcctgggttgtggggggttggtcgatcgataatgagcgccactcttggggtttgtcccgactggaatttaatggaatttcctccgtaatggaattaatatgagtttaaataatataatataatattcaaatatatataaaaaaaatataattctttataaattaaatcaaattaatatgcgatctacaaatagtgggacagggatcctggatcgggtccccaagtctaagctactgcaagtcctttgaatgcgccaatctgcatacgatcagagacggattcggcctcctaggatcatccatgttgaattgctggtcgattttggatcgtccttttgtcatatagtctagaactgaaaaaggcttgcatatccccttcttatccttctggatttctatacaccctcagctttatttaaaagatcatcccacttgcgcatcttctttttaagatatttcattctcgactgctccaacccccggtctcacatctctcacatacttgggaacacaaaagtggaggctgcctttcgttcctgcatcccggttacaaacagtcgccgtgctgcagttatccgctttccatccccattgagacgcctgcacattgttacccttgaactgtgtgagtacatcccagcaagttgcttctggctctgtttgccagagcttgattggacgccggtggccagattgccagcgtttgtcctaccggttcccgcgccggagcgaagatggctcttccgccgttgggttgttcatgaacaccctctgccggggacggaatggtgctgccgaagatgcttcgaggcagttggctgactggatctccacagtgctagcctttcttcgcactaaatcgcaaccccgccacccgagcaacaatatctataaagagaacagttctctccggggcaaacccacatcattctccttctctagtatcccgatacactattttgactgagactcaattaccgttctcaagacgatttcgtccagcacctatttctgctactatggtttacaataaaccaacaagcggagccatgaagagatctgcttcggctctcgatggacccccaggatggggagatgttcctgtatgtgttccctcaagagaaacacaggttcattcttactgatatccgtttagtcaatgatgaccaactcccgttcatcattccgtcctccttatactcactttgccatgatctacctcgaccgtgatggcaagctcaatgttgaggaatcaccttctattcaagagcaaaactccactgtgtttaccgcagaggtccgccagaacttcctcgagattctgggtgaacgcatcggctaccatgcccctcgccgtatgtccaagttccagacccgaagaccaaccagtatatgctgataccaatctacagagataatggacgtatctcctcgtcgagtgagacgtcgcaagggcaatgctcctgctctttctgtttgtgacaaccgcctggctgatcaggacactgatagcgaggacatgcctaacgggtctactgaaatggttcccctccgaattggagactctcaaaaggtcatggcctactatgaaggtgccctcaagcacttccagcaactgaactgccgtatggttgccaaggcgttcatcaaatttatcgagcctcgcaagcaggtccgacacccttataatggtggcaaggccccgccaggatctgcccccggtactaccggtgacccagaaaagaccaagcccgagtggtggcctcccggtgttatgcacaaggagcctgatcacctgagaaaagagtgtatgatttgcccatggtcttgattcttgatctactgactaactgagctttaatagaccgcattgagctcttgcttcacattatccgcaagctcggttctttcggtatcactgccgataagcttaaggatgttgctggcgacaccaagcgaagcttgaagcacgcatctcatgtcgagatcatctacgagatcctccgggtccgcaagatggaggagcgtttcgaacgaggtgaagtcgacgccagcatggtcgtctacaccatgaaccgcggccccagccctaagagtgatgaagaagacgattccccctcagtgaccattgaggagcctgagcacctcaaccagggattcatgacccccatctcatcattcgagcacacatctacctccttagctacacccatcgacaacatgccatcggcccgctccctcccaggcagcttctccatggcggagcctctcaccttcgaaaaccccgcccgccaggaccgcccctactacgccacaccttcccaatacagcgattcatactcgcagcccatgatgagcacccccgtaacatcggagatgatcagcccccacgacgtctcagtctcggctttcgactactctcacaacacctaccagaactccacgcctgatcagtcacgcgggggaatgagcggacactacgatacctgggccccatctttccgccagaacatcttcagccctgtcgactacactacaccagcgactagccagggcatggcccagccttcaatgtcctaccagatgcccatagtatcgcaaatgcatgacatgtcccatcaccatgcccagcaggcccacatggactccatgcaccaaagatccctgcctttccgcacgggatcgctgggccacccacaccccaacgggatgactctctcccacactgtctaagtggaacgggcgactggaggatggcgattaaatgggacatgggtacaggtatggatatggatatgggtatgggtatgggtattaacgaacgtgaatgagtgatggcactggccaacaaacttggcgctcatcttaaggccttgccaggggagttgttgtctttctttggggtttattggataaaaaaacttggtgtcctcttgacaggtgcaggtacaaatgggttctgtttgcttcttcgttttggaaatatttgggtcttgtgatttgaagtgattgatattccggtctttgtttttatctttcttcttttggtctcgcctttttttctcacctttttttttctttcttggtgttagcctcatgctttttttcccttggtcttctgttgagctttttatctgctttgtttggtttttatgggttttcttcaacgtggatggttggagctgttgatacacagatttgggtagatacttcaaaattttattcgttggtaatatgcaactgagctcctctatttcttttcacgatcttttcattagataccagtattcaactatgttgtacctatatagttgatttcctctgccacttcttggcgtgctctttccgtattagtgctccttattattatgttagccaaatgactcctctctgagttcctcattctctgttcctgacagtctaaggcggacacgttgctgcttcacctgactgtctgttgggcgcgaacttgaggctagcagtgaaagaccactaactgagtaaattgctgatgttcgtgctgccatcttgcgataatgaaccgcctgtctctcctagatcccgtatgagcttttcaattgtttctgccctcccactggcatgcaatatgtttccaattgctgcatataactgcaaatgagccggtccagggagatcaacacgcgggcagtgatttgtcaatgataccagcctgtcctttggcaatgcaagttcgcagacagatgagaagcgcgggaaagtttcgatgtggtattgatgaggggtcgaagtggcctcaagaacaaagtggaagcggcggaactcaccatggaaggtatcgaccatcatcataatattatccgcacgattaacagcttcggatgtcatgtcaaatgtagaccggagactcggaaaatagcgaaagatttgtgtccatatctcagagattcggcgctgttcatcatcagtgtcaaagctcccaagagcaaaagggataatgtggacagcctgtaaggttccttttggttggccggggggaaaattgtggtcagagctccaatgcttggtgatggtgcattgatagccgtctctcttcaaacagtcccggcggaggcatacttgttcatttcgagtcgctgatgtgatgtcgcgagagtggaggtcttcgaccgaatcttcaaaagcgaggcggggggatggggtgatggcgggggtcttcccgccctgggatagcaacggccgcaacaggcctgtatcgatgctgttggcaagctgccggatttcgtcgttgtcgttgcagtgccgacgttgatgcggtcctagatatgagataccgtggcaggggaagaggtcgtcgcacgcaatacttagtacgatggtccgggcttggaaacgaacacctggaatggttagatgaggataacctcgtcggagcagaggagaaagtcctggagtacctccaagacgtcctgcgtcatgcgcaggattctatcaattaaccataacctagaaagggtctctttatattcatatttacttattgcactacccctctatcgaccgctagtaccctgttcgtttactctttcatcatctcatttccgtttctactactttgttagtatccactaccttacttatctctcagttccttaactatttcaatcctcctgtgcctctcagttttcttcctcctatatctcttagctcgctatttaatatactacttattatcctacccttaccttactaatatacctatccggagatctgtaggtcgtaggcgttgtccttaagccttatagggacgcgcttatacccattatagtatagctagcgacctaaatgagaatactatagcagctgactataccgatactaataatgaccctctgcctactactaagtacaattccggcttacttatagataatatcgcggataatagtgacctaggcttacttagggaggctcttatcctacctaagagcggatggactatagataatctaaggccgaagctacctcctatactaagaactaacgttatacggtataccttctataccgagcgaaccttcgcgctcgcgctctactatttctataataagtctaccctatacgcactgcgttaggataaggcgaagatattatacctaatcgatagctaacgtaacagtaagatacctagcccttcgtcaggcaggaaaatcgatatacccaccgttacaatatggttcgttttctacttttcaattcataactactgggacaaccttaagtataaagcctgtcttgccttatcttacgtttaactgacggataagggcgtcttctactacctatacacgataataccgtaccagagaagttcccggttttaggcagactttgaccaatatagggatattcgtacctcgcgtgttcctctggaccccccgatgatcgtgtgggccaatggattgccctggttcccagtctacaaagcgttttacgtcctctgtgggagctggagccctgtatcgtacctcgtgggaaggaagtaccgctccaaaaccactgagttttacatcggtacagcactggccccgcctaccgctgtcttggccggtcttgaagattctctgccgcaattaaccctccgagcatttgattcagcgacatacccagatcctaaggacacaaatggccccctcgacctcgttcatgtcgccaccatcagccgtagccaaaacaagaccccctgcccgtccactcgctggcctaatagggagacctctggaaaggcgacgtacgcctttttgggttctaaagcgaccccgtgcttttcgagcacgtccaggacaagggtcaagtgttcgacatgttcgtcgaaggtatcagatgctgtgacgagatcgtcgaggtacgcacggcagaactcgacgaactctttcaggagtaggtccatttgcctctgaacgtagggcacactgttgcagaaccccatgatcgcgacatgaaacttttcctggccccgatgcgagacgacacatatccgaccgcgatgttcgcgtcggacgcgccattgatagaaaaacttagatgcgtccaagacagtgatgaacttcttgccctgtgtcagaagcaaaatatcatccatggtcggaataggataaatatcgcgcacgacctctttgtttagcggccgaaggtccaccacggcgcgacccttacgctcgggctcgcgcccgggccggtgagtagtacgccatacaacaaagacggggaaacccgtagcagtatgtcccgttgtataactcatcttcccttggtcatgcaacggttgaaaggcagcgtcaataacctcgcgatccttaggaccaactgggtaaatcttagactttggaagccgtgcctcccagccaggtttgaggggaatcctgcccctcgagggggaagtaggtaaaacagatctcaaggaaccttttcgtgtcgtcggtatgatcgtcgggatctgacgactcgtaacttgaaagcgcgacatcgagggataatttggcctcggcaaaggtggagaatccagttgatgaaacagcagggctgagagtctcatctgactgcgacattgcaaacaagaggctggaaaggtaaaaggaaacgagtggtacagcggttcataacattcaacctgccgtaaccctttctgccgcctgcgtcacctagttagagttatcaaaagttacttcacaaaataaacagaattatagggccgagtgctctctttgaatagactaagcgtaaactgagtgcacaatagataccttcgacaaatctctaagtaaataagcatactcaccgagtcacgtgattattgcggagcgaagcgtagcaattaaatcataacctcgtgtgcatgtcacgtgaacgttcttttcttgtttcaatgcggtgaagaagtcatcggctaactttggcagaataatccaaccggcagaataaatatagactaggcctaatctggctagacgataatttctattacgtgctgtaggttacttactagagcagttactagagcagttgctcaagcggtcattaagcgattgcttaagtggttagttacttaaacagttacttgaacgtttacttaagcggttgctcaagcggtttctcgagcggtttctcgagcggtttctcaagcggttgcttaagcagttgctaaagtaattgacgataaagcagtttgattaagtagttaataatgatatgataaacgggacttaattttattagtagtttacatataaattgaaagtacctgctatcttaaaagttactactaccatagcaggaaatatgcctaattgtgaaggcggtactgaaattacaggcatggcagagaataagctagtaagagggggctttgcgtagcattagaagttggaataagtcgcttcgctctgcaacgactatcaagatgggcaagccccatacgtagagaaacctgacctggtcgaggttttacctataagtgtcggtcttgtacttattggactataggactcttttttagtttcatatattagattctgtttcttacttcctttccaaaactgttttgtatctattaaattatcattttttcctccgtacttgtcttcgagttcgaatccctcctgacgctccatatgttgcacaatatctgccctcggtggatatattgatatctgctgatatactaatatcatcttgtcaatatacctattgttacttcagtctaattggtcctggaataaagacttcagccgcggccaattcgacgcgccagccgagaccagcgcttggtcagcggagtaagcggagccactccgctcagcttgaagctccgcgaccagggaaacttgcatttccatcctcttcaatcgctttgtgctcagtacgtgcttgacttccgctctttattctcatgcaggtctcattttgtggctgattaactggtgtcgcctttctagttcacgccacgagcgcaaactccgacgcgcacgcttcacgagcttgaacacctaattaatcgcaaataccgaaggcgacagccctgaggtcccttgcacatcctgccgaagggaaaagactcgtgagtttactgacaggtagcgcgaatacctatccccgagtctcttcaagtctccttgcggctttgtaacatgggctgacttctttgttgtcgcctcggcgcactaattccagcgaacagcaaacttttcagatcttcgcgcaatcgactttgcatctatttcatctcggaattattgacccccaaaacccgaaatcgacttgaccatagagcgagcggtggggctgtttcaagaggtggcggcctatccagttgaatccgctctttgcgggcaggatggctagcccgttcaatccgtctgcaggccgtggcaggggaggcgcgccgggcgtgccaggctcaacgggacggggaagaggtggacatacggtgacatatgtaccgagaggttcaagtgcgcctcgcgcaacgagggctcgagggcgtggacgagggtcggtgacatggacagcgcgtggccgtggtcgcggcgcaggcgctgtgaaccacaccgcaaatggatcccagcaacctgcagagggcctcaaccctagtgttgtcagctcaccgtttgcgcaatcaaatcagcaaaaatccgtcgcatcgccgttcggcgctcagcctgcacagcagtctccgttttctagagtctcaaacagtgcttcggcttcgaacgtcgccaagaacccattcgcccaacctatgaacactacgaaacaacaatcatcgaaatttgttggcgggggatctaatgttgccgcggccgtggagcatgcgtcgacgttgaacaattaccaggaacgctttgacaaagtcagtctgcccttcctcgaaaccggacgacacgaccacggagctaacccaatctgcagctgaaaatcgatcaagtaagacagcgtgaacgagcgatcaaggatgggcaaatggcggacccgaatcagccgacttctttaaaccaggctatcacacccgtgggtacctgtaccggcatgtgccctgatttcgagagggtggagcggatcgtgcagaaagcagtggacaagtgtgaaaaggtaatggtgcgctgatctctgtctttggcgccacactgacgcgactttagtatcataatccgtcaacggaccagctggaaatcatggaaaccaagatggtgaaacgcttccgacgtgcggcagctggaaatgacgagcaattgccctcggatatccgaacaccaaagacacttttgcaaactatgaactatctcatccgttatgtgatcaatggtggtgaaccgttggctgtcgtccacatgtttgtctggaaccggacacgatcaatccgaaacgacttctcagtgcagcaacttacacatgaagaagatgtgaagatggcggtcatttgtctagaaaggattgcccgattccatatcgtgtccctgcatcttctttctagtccagcgaacacagagcagttcgaccgtcaccaggagcgtgagcagctcaacaacaccatgctctctctcatgtactactacgatgacaaccgcggacgcattcacttccccaacgaggacgagttccgcgcctaccacatcttgttctcgatccatgaccagcggcctgacctggaagcccgtgttcagagatggccaactgccctactcgcttcacctcgagtgcaggtggcattggaactatttgccgctgcatgtaatacatgggagcctcaaggtgccctggattctcgccgaccgaacgcaattgctcagggattctacactcgcttcttcaacatcatcaattccccgagtgtgtcatatctgatggcatgtgtggctgaggtgtacttcaaccacattcgtcagacagcaatccgtgcaatctggaaagcttactgccggactccgctatcacagcaatccaaaaacgataattggactgtggaggaattaaccaaggtgatgcactttgatgacgaccagcagacaattgaatattgcaatgcccagggcttgcagttcgtggagaatgcgagtggtggactgtatctctattggggtgatcgaccagttgactctgtcggtaagtggtcttaaactccatctcgaatctcgtctctcatttcccacctcaccctctccgtcgcgcctgtttatgatagcttccatcgtatttcttcctctatctttctttcgtgactaacaatctcccagactttgcaccttcaaccgaccactctttctctgaaacatacgtggagtccaagcgcgcaggacgtactcttgttgcggttatactcggcatgaacatcagagaagccgcaagaatgggtatgattgatcgttcccagttgcctcataagagtgaaaccttgcccgaggctgaggcagaagatggggatctcttcgtgagtgatattgacaatcagacacccgcacctgtggttgaaacacacaacaccattcaagacacatctgcttctgaattccggatcgcttctgagtctcagaaatgtctacaatctactcctgcaagttcgccttcactgttccagtcaaatctaccacccgccgcttcaaagtcgccaaatcctttcggcatctttcagccatcaaaaacagcatctcctccctcgaatccattcgcaacctcgatcccctccaccaccgttacaccctcagcgccgtctcctttcgcttcttcgccaaatccattctcgttcccgaaacccgagaagaccgacgcctcttccctgaccactaatgtggcaccctcgccctttcagacaaaaccccctcctcagaccgactccgccgataagccagctgtttcgtcgattggctctgccggaccctcaccgtcacctttcgcctctactccttcttcttcgtccatattctcaaagccagcgtacgcaaagcccaagacagagacagctacaacaactccacccgtgcctgaatttccaaagcccattttcttccctccggcatcgtcgactgcagacaaacccgcctccgtgttccagaatggctccggttctgtactaccccctggcccgaatcctttcgctgcgccgtctccattctccttctccgagccatcagaatcaacccaaaagacagaggctcctgcaactattcctgcgcagtctacgttcaagcccagcactttgcctcaagagccgtcgactggggacaaacccgcctccatattctcttctggcgccagcgctttcactgcgtcgtccccattctccatccccaagccatcagagccaagtcagaagacggagacaccggcggcagttactaccgcaccctctacgttattcaagcccataagctcgcctcctgcgtcgttaactgaacctaagaaccccttcgcgtcctcgatattctctggtgccaattcctttggtcccacaaacacccctgctgctccatcgctattccaaggcatcaaaccccaagagacagctgtcaaaaccaaggaacctgcaactgcgcccaatttcgggcagcccttctcgccattctcggtgaacaatgctagtacgatttcagggtccccgaacgcggctgcaaaccaatttccagtccctggctcaatctttgcggctctgaaggcaacacagccaagccagaaagcggatatcccagctactgcgcccacaccagagaaccagccatcagggttttccccgtctttgggtagtttacagtcgcccaagccgagtgagacttcggtgttcagtcactccgcacctgcgccggcccaagtgcctggcgcacatcctatcaacggccatgcttcgatttcgggttctcgtcggtctgtctcgcaaactcaggcgaccgcctattcacctccccagactctttttgaagcacttcgacagcctaaaatatttgacaccacatcgaatatatactcgtctgaaacggcgactactcagccaacacctttgttccaaacctcagagcactcagtggtgccaggacagcaagggtcactgaaacgacagcatgaggccagcaatgcaaatgtgtcccctcagcacaagaggcgctcctcgctgaagaaaaaatcccccgaggcagcgtctgatggatcattcagacggtcggtgcatttcgaagaggcacacgaaaatgaacctctggcgccggaatcgcaagggcgcaagaagtctaaagtcctccaaaagaagcgagtgctggatgagcagattgagccccagccggaggaacagggtccgagtactaaggtgtccaaggtttctccagaggaagagcatgtccctttcaatttctcggtctacaaagcagaaaaccgccccatgccgaagcttccgatactggaaaagctagaagaaaaacttgcacgagccaaggcgttgtgcgagccaaggcgtcttaccgaagaacaaatccagtacatagaggaagctcgactgaaacgggctcgccaggtcgacgaggacgagattgcgctctcccgggcacgaattttggccgagaagttaaggaccggccctggaatcttcgatggttggactggaaacatccgagagccatggcacgatccaaactggaaccccatttcccgaatcgtggaaaagtatcaagcccgcaatattccccagccaacttcctatgtacccccgcgtctgacactcaatcgctccgccagaggatacgaggtcgcctacgcacctgataccccggaccgacctatgtccagaaccgaacagcgtatccggcgcactggtgcccgtgggcttacacatgtgcccctggatttcgaacgccacaggcgagagaaagaggagatggctaagagcaagaacggaaagaaggagaatacggataaagacaaggatgaggaagagaaataggggtctccctagggtgtttaaggggatgcactacgctttcctcattcctcatgctgtaattatctcatggtgtatcttgcactgatttattctgttctcatatgggccgtggatctaagtgcccgcctactctctctcatctcacatttgcattttgcggagtctttataatgatatctttttcctcaatagacattcacagcgagaatttattcatctcttccaattactttctactttctttttctgtttatttacagcctggtttataacaggggcgttcagttacgacggtaacaccatgtatagatctgctatactataacggtagttttgttgaactacaccgtgatactacatatacatctctagacatacccaccgaccccatttagctagtaaaactacacacaacagtacaagtggctaggaattgctccgggggacaatttttgtatgaggctggtacgtgcacgacaaaaacaccatacaaagtgggccactttgtagagaccccgagtgacttttggggaggtcaatccaagttgactgtgtagtagatataaggatagaaaatgatatactgcacgaccatacaatcggcaccttccaaagccggaaccttggacgatagacaatgcacaagacataatgcggcatgtgactagactagccagccaatccttaaccgctacttgcgacgcgagcctgggatccaaaacaagccatattcgctcgaagttcggacaacacgcgatatgaaccagtgtcaaaaaatgacgcggaatcttcttaacattctcacacgtcccttcaaggcgtttcgccagtcgccctgggcattatcgtccgcccttccatcccgaatcgacgcgtccttgctggttgaagaggagacttccccctacgaaccacctatttttatccggcgcggatcggtgaaatacttaatgaccggtatcaaattgcgaccaagcttggccacagaagtagatcgagtttatggcttataagggaccttcactagttcgtattagcctaatcatattttaaggtatttattgacagtttaggtggtactggtcgaataagcgatatctagctcttaaaattaactctaatgattcctatataaggaaaactgctaataacgttaagctagaggttctgtagcttataatgagagcgaaccgttaatataagggctggcgtttcgttcgaaaattacttgactctttttctgtccagggaatctcagggagtcatgtatgtctcgtcttcgagcctttacgtgagtcactgggaaaatattgccaacgatggcaagatggtgtgatgccaccggagatttttaaaataatactccaagaaatactccaagcgcttgattatctccacactgaatgtcatatcattcataccggtaagaattctgatttgtgttagttaacaatatggttcttattcagaaacagacttaaagccggataatatcatggtacaactggaagatcatgggctcttatcccaggatgctcgagatgagtttgaaaacccactacctcagaagcattgtaatgatggacgtatcatctatctatcctataaggactatgaaccgctgaagaaaatcatcagactgattgaagtcgtcgactttgatctagcagtctaaggtgatattcttcaagatggctgtatccaggcggaggtatatcgtgcgccagaggtcatccttgacagagggtatacgtatagtactaatatatagagcctaggagtcatagtaaacagtattcccctaatactagcgcagataactaaccattgaatgaagctatgggattttctagaaggacgaacactgtttgaatcagttgatccacacatcgttgaagactatgatgacgcaacgcatcttgcgtatataacgtcgcttttgggtcctgcccctaaagactttgttcgccgcggcaagaggacatcgatattctatacggctgctggtaagtaagtctttcgattaaattgtgtaaactaacactgcattttaggaacactcaaaagagaagaccttgtgcctagtaactttagctttgaaagcagcatctccaagtttaatggggaagaaaagaggatgtatattaagttcgtcaaccggatgatcaaatggaaccccgaagagcgaagtacggcgaaggagctactgcaggatccatggcttcacaatgattatccgcaaatataggcggagtatgcgggactgtggagtacttctctgggccattctttgacaacaacggtattactaggtttcctatttcgaacgcattattctcagaccaatgaaacatcttaggccgcttcctccttgaggaccagatccccgaccgcaaactagacgacacagcttcttttcttgaggaagaggagagggaagcatttctggatttcgtcaagggaatgcttgtttggcatcatgatgcgagaaaaatggcaggcgaactggccgggcatccttttcttcaactaaggtaaacaagagcctgatttctgcgagcgtttgctagcggaacgacttgacttgatggttgatcccagttcggcgatgccatcagatgactggttgaagcgttatgatatcgatcttgatcttaggcaactaggtgtcaccactgagtgttctacgggcgactcaccgcatatgtatgcccaggtggatgacaacattacatttgaacccttcagctattcatccatgccgactctcaaaagtgaattgaatgtttacttggaaatggtatatacactgagaaactcctcttttatagactgagcaacatcacgacgtacaagcaccgctatagcagtttgacccagaacagtagtcactggtacttccacaataaccagacgcggaacagcacgtcccaaactgggtaccagtgcaggtcttgtttccggcaaaattcgggccacattctccatttgtggacgggccgccattatcagtgtcacaactgccagaatagcagttccctgcaccacaataggtggtaccattgccgcagtagccctgtgtctattatcagcgactgcagtgaataggaaggatggtcatgaatggatactgcatcacttacgtatatactacagcagtttccgaacttgggaatacaagtcgtgcccccataatcaggtccacaggtgccgtcttgcgtcgcggtgccgttgcctgtgctgatacagtaatctgacccggttccgcagtagccaaatggcgagcagcagtcgccaaaggcacttccaacacaggtaacccccgcagggcacgtaccgtccgttgagactgtctcaggggtgacaggggcgacgcatatgtcgtaattaagccacaggttgccgcaggtggagttaaggtacgggttatactcttgcaactggctaaagttcagaccgaagcgcaggtcgatggtagaacagtcgtcaccggctacaacgagatagtagttaccgcactcgctgatggttccactttgggtcgggtaagccgcagtggctgctgtgtagtaagtaggctcgccggtcgcaccaggcgccgtgatggtcgcgttgggtttaggaaacgttcctccaggagcacttttttctcgccgagtctggttagcatcactcaatgccgcaaatgcctctattgtgtccttcttgatcttagacttaccttttacatacacgctgtcctgctgcaatccctgaacaactgccctggatattagtattccagctaagcaattgagcagtggtcacggtgtaagtcgagttggaatatctcgtggcaaggccgtcactattttcagaggacttagcacagattatggtctcgtggcttcaggcaaccattatgccctacataccaacttggtgtatcccaaaccgtatcgatctcgcatggacgggggaaacaggtagcctcgtcgaaatagcaagcgtaatccccagtggcaactctagcgtcacctgttgatatattgtacctaattgccgcatgcagcgcattagaaatcagccagcccaccaactattgggggaatgccatccatacgtatcgcaaagatcattgcaggtgagccagttttgcagcggctgcaccatttgacccagacaagtcggtgtagttgttgcggaggaacctgtcgtcgttacgctggtggtggtagtagccgttgccgtccctacgtataaggtggaggctgaagtgctgtaaggcagcgttgttgagcaatttgtttgaacaaggttgaactgatcgactaaataatccgtgaaattggtaactggtagccaaggattcaggagacgttgccgatacagattcaagaaacactcattgcagaactacgcccagttagtagacaacctcgatggcactgatgtacttcatagggagttcacataccaatttctcttcatatatattagttagagcggacatgtcatcactgatatcaccgacgtcaaaatccggatcggcacattcaggcgcgactgtgctgttgtcatcaccatcggcgaagcacattgttggatcccaacggatatagtcacttccttgccatgtctgagagaccaggaaacaccaatttgatgaactgtccttcatgcatacaagatcggaattataggtaaatgtcagtggtagcgctctcgccttgaccacgacattgccctggattgtggtctcttctgcacagactgttgcaacattatccttccagaaactaagggacgagacacagtctgtcgtgcagaggttctctacctcagcagtcgtccagactttatttattagcttcgcttcttcgttggcagacaacaacatgtttggacataacaagcttacagtggatgtctgccccgtgtcctaataggctaatagcggtttcattgcaagagacggtggtgttcctggtgaggtgttaaagggataagacatttcagggagacggaaccagaggcaagtactcacagtgctgcaagacacgtactgctcagagagagcccagcaatcaaggcgtctgcatcatagtttttgtacagcgcaaaatcggccgcagcccaagttgtccatgccgtaagcaggacaaaacagagtctcaagaaggagaataacattttgtccattgggtaggcaaggagctatgataatcgaattgctcttgcacgaggatggattggacggcatgaggaacaggaatgtccgggcacttttctctcttcctctccacacgaagggctgcttggagtgcccctcctcgatgaagacgctatcatttatcccgccggtttccccctgcatgatacaggtactaggatatttcgggcaattcggaagctcgtaccttgtgactgaggacttggtttgcttcctgttagcctgcacaaggataccggagattaggtggctgcttactcgggatatctcgtccatttagtcaccggccccggaggccagtctcttgcagccaatggccgaagcgacatgtgaaatcttcccataattgactgctagtacttcgttcaacttgggggccaaaggagatctaagccaatcggaatataaataccttatccagagcacacgtgcggggttcccactcaggaatatatcattaagcgagcacttgagtaaacggtctaaggttacatctgggctgcataagaggtttgaggtaaacaatgtcagattttagttaactttcgcagatgcttgtcatggttttcggttgaaccgagaccgaagttctcccgtacctgcacgagccatcatatcatggagttgattgtgaaagcaattgacaagccgaaagacccagaagtgacgctccaggaccttatttggcctagtactgctcttagtatggctactcctcctccaagcctcaccttccgtcaggtattagtccgctttccacaagcccctctatttccgccccggggccgtcaagagaacggatgagtacgagaacatccctgcattcacggtggtccagatctccgcggattctgcctaatggccatggactttggacttcagcccttggtgcaagcctctgcaggatccttcggggaaatagcttgtttgggcaatttggtggtagtttgaggagtaggataccccctggcgtgcatgcatccaccatcacttcagtaatatggatggaaaataaagggcgctggcgtgtgaccagcttctcgtcttctttgccgtcatttccgcccccctatctgtgccaaaagaaattgtaccctgtcttctccagaggctggaggttgttgtgccgttgctccaaagacttcaacgacaaaggtcagagtggcttttgttcatcagtccctcattgataccatttgcgtgttgagctttggcagcagcttcaatgcgaatccttctgccagcgcttcttgctctcgcaagttgcgggatttcccaaggtcgtcaacaaccccatgggaaacgcaaccacgcgaaaccattgccagagttcactccagtgccccaattgccaaagaactcgtcttcggccctgccgcccctctaccagccctattcaaagaacaaacctaagttcgaaaacgaggcccttatccggcaattgtctcagcatccagggctaagacttgaccatcttgactctggccctggctctatgcgcaaaagagaccttcccgtaggcacttgcgcacctggagtaccttgcacaaatggagcatgttgttcaaacactggcgtttgttcctacgccccctcgagttgcggggctgacgtctgcatttccaactgcgacgcgaaagctccttgtggggaatacgccaaccccgataacgcaacgtgcccgctgaacgtgtgttgttcgcaatatggattttgtaagcctcagattcgcttggaaatttctcatttttgagagcagatgctgacccttattttaccccccaggcggcagcactgatgacttctgtggcactggttgtcaggaggggtttggcggctgtggagcagctccgactccttcttgctctagtggtagcaactctgcggctgcgcggcgcatcgggtactacgagagctgggcgaccgagcggccatgtgatgtttttacagctgaagacctcgagctgacgggtctgacgcacatcaattttgctttctcatacttcgacccatctactttccagatctcgccgatggacggaaatgcggccacactttattcgcgcttcacggcgcttaaggcaaaacagccaggactgcagacgtggctatcagttggcggctggtctttcaatgatgcaacgaatacgccagacacacagaatgctttcagtaacatgatcagctcctcggcaaatcgccaagccttcatcacttccctgcgcaatttcatgcagacatacggctttgacggcgtggacattgactgggaataccctgctgccgacgatcgaggcggtgtcccagccgatttctccaatttcccaaccttcctggctgaattgagggcctcgttcggtagcggattgggaatcagtactacacttccatcttcatactggtatcttcagcattttgacgttctggacatggagcctagcgtcgactggttcaacttcatgagctacgacatccatggcgtctgggactcgagcaacaagttcacggggccttacctccgcccgcacaccaatctcactgaaatcaacgacggcttgtccctgctgtggagggccggagttaacccatccaaggttgtgcttgggctgggctggtatgggcgctcctttacgctcgctgatccgtcttgtaccacgcctaacggcgtatgtcagttcaccaccggcggtactgcgggagagtgcacacggtcatccgggacgctttccaacgccgagatcaaacgtcttctagcggccggaacgggaaccgaatcatatgatgccactgcaggagtccgctggctcacctttgatacgaaccagtgggtaagcttcgacgatggagcgacaatgcagcagaagctggccttcgctaatagcctgtgccttgggggtatcatgattgtaagagaccactttttaccacagtcaccaattgccttccttcgtttcttatttttttctttgccctctctctcactcttaacaccattttcctttctttttttggaaaacatctaatcaaggctttcttccagtggtcgatcgatcaggacaacacagctggcgacagtatgaacgacttgatgggcatcggtacagcaaatggggtgtcagaggcagctgccgcttcattcaaggagcagatggctaatgctacgctgcagaacgctgttgtatcgagctgctactggtcactatgcggaggggcctgtacgaccgggtattttgatgtaactgatgcccgcggccagattgccggcttccagcagaactccgtatgccctccaggcgaagcccagacactatgttgcgccccaggaacctcgatgggcacctgtcaatgggagggtttcaggggcgtgggaatgccttgctcaccggcatgctctgaccccaaggccaccattgtcgcccgtaataccaactcgtacgagatgaacgatggaggtcagcttgaagatctgacttgtactggtggcttccaagcatattgctgcacggaatttgtcccttcgtcgatcaccgattcaggcaacctcttgctctatggccagactcctgtgctcagcaagcgagacggttctaatcagggcctcggtctctatgtaggcgaccacgcggttgaaaagcgttctttacccttgctagtctccgggttgggcgctctctgcctcgctgacttgctcccatcgatcctttcagcaccgttgacttttggcctatctcttgccgcggagggggcaatatgcggtgctacggccgctgccgtcgtcgctactgcggccatcatcggcttttcaattctttacaacctggttgggtggattttcggcggatccccatctaaacccaacgttggcgtcccaacaacagtagcgggccggtcttcgtatggccagtggccgattctcgacttgagcggcggcaccacgacgagtacctgcgattgtgtggtcacatatacgtgccgctatggcatgggttgggatgagatttgtgataaccaaaggtggggggtcgacaagctgctcaacggaaagactgtctatcagccgttgccaacgagccgcgctgccggtgctaaccaaggactatggaaaggccagcgcatagaggcataccgaactgcggcccaattaaagctcccaggcaaaacgtggcgatgtcaagttgatgagtttcctatgggcaacctcgcggaatcaggaaataacgccccgcaggcttgccgtctagtcaacggccctgcgaatgcaaaacagggaaatgattacaagatgtggaagtcggcgcagtggaaaccttgctcgacgtaccgctctgccgtgtgcaacagtagggacagtgggccgcctgcaacctggtatgtaaaaccgaagcttccctcatgcgatcatatctgaccttgaaacagggcgtttggggtgctacccgcgggtcgcggtagtggcagtggaaaacacttcatagatgcttatgatttcgacgagcaaacggccggctcgctttgctgggctacatacacttacaccgagcagcctggaactatcagcacctccacgcctgtcgaccatggtttccgcgttcttgatgatgatccgtatgtttccatctcccaactttactaggtagtcaatgtatagctgacaagacgatgttgataagcatgtacggtaatgcctatgggtggcctcgacagtcctggcgcatcgatccagctccattagcgaacatggcagaccggccgtatgactcccaaccgacgatattccaaagaggccttctcgccaacgacacatggcccgaggagcatagcgactccgctggcgtctgccacgctgacctcagatcacttggcgatgacaaacaggatgtttatctcgacctggattatgataatctcctctttgtcgatctggatggcaaacctgtcgacggtcggacatgcaacatcatctacgaggatgacgacccgcactccgaagtgcgtatcgtacttgatgagaatggtaaggtcgtggaaatatatatgggcgacccagatgctggcttgtggactagggaggcgcttaaaagttccaattcggacaaggtgactattgatcccaccaccgtgactgtcatggcgggtgtcccggcgggcagcgagtcccgacccacgtttcctgcgagtacgactggactccagacgagatcgggaaccgtagtgacaccggcgccgcatgtgtacggtctttgacagcatcaaccatgtcaatgacgaacgaaaccttggaagctatgggggtttataaatatatcatctgatatgacgggcttttggctaggttgggaagatatgaaagaaaatggaaggatcgagactaaatttgtaaataaatcacaatcgtttacgaaaatggctatcctcgtgactggtttcttttgaaattgcacatccctcttcggccctggtacctccatttccgcaggatagagctcggaaatcgtctccggattgaaggcaggatggcactgggatatctaccatgtgggagggatataataatcctcccaacggtccgattcagcatctctgaaagtatcgatagtaccttctaccccttccggcccaatacaccagatgcctttttcaaccagcttgcgccaacaatccaacaaacgctccagccgctgagggcgatagtagtcaccaccaaagggcttgaatccatgctgaaagagctctgaaaagcgtccccgatcaacaaactgcccatcgctttttcgcgcgcctactttcctgctccaatcatcattaaaggtgaacgggagtaacagccgaaatccctcctctgttggttcatcaccgtttctctccactgcctcagtatacaggcctgcagagacgtgagacggtgtgcacgttttggtggacgttgaatagaagtccgacaataaccatggacttgttgttcttgtgagctggataggacgctggtctccggtatcagcgggaaaaagacatactggtggtgcggtatactcagagcggggtaatacactgaatggctgcgctgccacaaatccagccgagtcagctgggggcaggagaaggcccggagcgatatagtagaaccagggccgtctcgcgcgcgtcagaaacgaacgcgcaaaggatggatcgggtaccgaagcggcgtccaggacatttgatgcgaccagtggctctcgattatccgcatcagtcccggaaatggggctgatcagtaatggtgggttcggcagctgcgagatgcgcgcctcaatgacctgacacagtcgatcccactcggcgacacacgtagtaacctgggcttcgctatagggccgccactcccagggcccgattttctcaaagtcaaatagggcaggctctttcttaggcgaagccacaacttttccaagatgaataaggtcgatccagtgggagagcagtgtctctagtgggttccagacgtattgattatcctcaactggaaacccgtggtcataggcatcaatatgcatgaagatcgcgacgcgatggaagcgttgatggtagataacactgccactaccgtccacatgcgatatgacggcgtacaagcgcatcaggctgtcaaccggctggtcatgcatatcagcttcagcttcctcaaaaaggttgtttggcccatcgataccccatgcaaaaacagagaatgggaggtattcgtgaggattatcaaagggaaaggagatatcatagcagtgccaaggaacgccgccagtgacggatcaagccttggacgacaagcctcagcttcagcttcatcaccgaaggccgtgaaaaagttgtcgttagcattcagagttgccagtgggcggccttcagcgagccaggcatattggatcaggtagttgtgtagagctgcacatcgtgcgtagtccattccttcgagatcatctcgtggagggttatctggcctgacaagcaggctggtaatatccggaagttgagaaagatccattgagaaaaggggtgtgtggctgtcaaaggggtcaatatcacagcctctatccaaaacaccgaggaccagattagaaccctcggtcgtcaataaaggacaatgtggtatgatgaagtgttgaacctgttgagtgcggttggtgtacggaattagtaagctggaagccgtgccttaattctactgatcagctttgatttcccacatgtgcagctatcatgtactggtttaccccgctctcaggtacgaaggtgtatagcggccaacagtcggatgcctgattttactggttttataggctaattgggactagctcttaccatttttagaccgcctttaactcaatagttacatatgtaccatcttttgaaagtactaacagttccagagcagatactggaggataaaagcacatgacagaactctgagaattatggtgccagtgtcaggaaccagaaatttgctagaagttgaattgctcgacatagcaagcggatattattcgaagaactaatggtcggcttactttaccaacatgaatttgacacagttcaggtacgcggctctatgagtcggatagtttatgccgctattgttcgttggatggatggatggtttcatatactctggcctcctgtttttagcctataatgcaaatacatgattatctccaccaggttgttccatatttcctacgatgaactttgagcctcaccgtgaaggcctgtaaagagtgagattgacagtagtcaagatgtcagaatatcgtaatagtaaggtcatggaagtttgagattaccgtcaactttagtgagtttctttagccctgctgaaatagaaggcgctagtgacgaggaggcgcggcgaaactagtccggtatgcatctacaaatatgcagggccagtaagtcgatgtatatacgacattgacaattttctttaaaactgtctcacggagttttcaggtgtctcggtgcagactttttgatctcatattactgtgtctgcttactagacagcatctcctcgaaatatatatttagacgctatcggggaatgctatatccgaatgccggggagacgtcattagtgctttataatcaactttatgcatggcctcgggaagtttaactttattttttctcctatagttttgctctctaccgctacatccttctacctttttctatatgatactttcgtggtaattggtattttggggtcttctgctttttttttttctctctcgcggtaccgctagtagtagcaattacgagaaggacaactttgattcttggatcctccacgtattcgctgactaaggcccgactctacgtcacctgggcaggctacgccacctcgtccagctacttctcagctcatccttatcgcaattaagcaccccacagcttcaatcaattaatcgcaatggcagagaatatgaaggcgtggcagcaggccactcctggtcctatcgaggagaagctaaatctcgtggacaacgtcccacgccctaatgcaaccgccctcaagaatggcgagattctcgtccgcgttatcagcgcttgtgtcaacccggcagactacaaggtcacggaggcgggacttctcgcccgtgctatcgtcaagttccccaaggtgctaggcatggacctcagcggcactgtcatggccgtggctgagggatcgacggacgtcaaggtcggcgataacatccttggccgcgtcgaccccgtcaagtcgtacggttccctgtcgcaatacgtggtgctgcaacgagatggatatgccgtgctatccaagggcgtggatctcgatcgcgccgctgggctgcccactacggggttgacggcgtaccagtgcatcaagccctatgtcaaagccggtgaccgtgtatttattaacggcggttccggaggaacgggaaccttcggtatccaaattgcgaaggcccttggatgtcacgtcacgacatcctgctcgaccgccaaggtcttgctggtcaagaaactgggtgccgacacagtacttgactaccacaaggacgatatcgtggctacactccaagccgagggcccagtctacgatctggtggtggacaatgttggcaactcgccgaaagactttttctccacgacgcctatgtttcttaaaccggagggtcacttcattggcgttgggggctccccatcgctatccacggccaagaatatcgctaagggcctactgttgccggtcgcactgggtggcacgccgcgtaagtttgtttcatatctcaccaagaatgtacacgaggacttcgagcagctggcaacgtggctagctgacgggaccataacaacgattatcgagtctacctttgagtttgatcaggtaattgaggcctaccagcatctgaaggtgggctccagtgcgggcaaagtcattgtacacgtctcgcccgagatgtgagggtgctgcacctctacaaagttcaatgaacgatattcattagattcttattggatcgatagcaactgcctacttcgtgagctctgaaatcgacgggctgtattcctagttgttgtatttgcattgtttgcgtggaatctttcttacaggtatcataaagagaagctgcccatcaattgctggatatatgttgaactaggaatatggcccctctaggccctaaacaggaaccgaggttttgttatggctgtaaatttcatattgtaccagcgaccccccctcctggccagtccgacccccctttaggctatgcgatccttcctacctgatagttcaggcataagctgaccgcctaacgtaatcggtaagcgagtggatcagacaagtgagtggatcaggcaatgcaaaacgcgtccatcaattagcacttagttaattcaaccacccaccatgccaccaattcgctcccaatcctctgcaaattcaacagagtaagagggtaggatcttattagctattcaggcttttcaaaataaagaaatctcttcaatacgcgaagcagcacgccgatttaacgtccccttctcttccttacggaaccgccttaccggcattaaaaatcgccctgaatctcgcgctaacaaccataaattaacagaaatagaggaggaatctctttaaaaatgggttctctctatagatctacgtggagctgctccctatccttctatggtttgagaaatggctaatcttcttctttaatagcgcggaactaccctagttctttcggtcggtaagaaatgggtatataactttgtgaaacggtatcctctcctttcctcccgattcttaaaataatataattataagtatacgaaatataaagaccctaaaatcattagggaatggtttaatctagtttaaaaaactattctttagtatagaatcgatctagatgatatttataacttcgataagacgggttttactataggattgactataacggtaaaggttataactagaagtaaatactatagtcggagatcacttctataacctaggaatcgtaagtaggtaactgtaattaaatatataaatacttctaggtaggcgcttcctctatatatgatttttaaaggtaaagtctttattaaatcttagttcgatagcctcctaggagattagcgctttaaagtaagtctaaacggttagacttctaataaaatctaataaaattgggcttcgctagctttaaaagctctttattctatcaacttttctacggttaaagggtcggtatcggcttctagtacttaacggtcacagaagctatttaaccccttaattcgactaaatttacgaggaaaacgatattataccaatttatatactaccgcatttatcttaccttttacaaccgcttgatatcggctgttttgcggtcctaaaacgatcttatagtcggttagttgaaacgaaaatacggaataggattaactatattaataaacttgactttctcgaagtatacccttctatataaattaaagcttttaaaccagagataatcaagaatagcttcttagtagctggtttagtaccctttttacccaatagggtacttttaaaactaaatatccggcttcgaaccctaaccccccctcctagccgggatagcgattgggaccctaaaactcccttaaactatatatagttacaaaagtaagctttatcaattaaagctttacttcgtataagattaagaagccctccgagcccattatactgcgcgataaatcaagttttaaaagcctactaaatcactatgcaatccgccgcctttcttaaaaaggaagtaagtgaattacgcgctgccaatgagaagcagaagcaaaagcggacccgatctataagaacgatagtccatgaaggagatctctcagttcaggaggttcgtgagctacggtcagagccatttaaggcctaagtagcgcgtatcaacaactatcgtgagcaggtttcagaaggtttacaaccacctccccgggccaggcgattgtatggaatatgtaggcagccaggacatagaagagagacatatccagatagatgatgattttagtttatttaatttaatggcgttatggtcgagataaatgcatttgaattcaatgggttacattgcctgatccactcacttgtctgatccactcgcttaccgattacgttaactagttaactactaactaactaactataaagtttcaccactttactggccgctttgcctacgatttgcagctatttgtatctttgctagcgagaaggtttgtagtttgcaacgtttgcaaagggtcaaccatacaagcaggccgcttctcactttacacctgcttcttctttctctccatcttggttatttttgacacgtgacgtactacgtcacaataagttgaggatttcttgtattaacgaccttcaatacatagcttatagaccttaggcattaaaattgaggaaagaagcatgaaattgtgagcagaatggtacattctttactatgtaaacaagaattcaagcctacagaaaattcaagaaatgacagaaatagctgatgcctaaagtctcgggcatggggtggggtcgctggtacaatcccctatatttaaacctcccctacgtcatgatacttttccacggttggcccacttatcaagtcatcaagtgccagtgcaacatatataggtccacggggtacaagagaaggtactggaaaagctatctcgaaagactaaaaagacacgatcaggccgcatactgtactgtactccgtacctatgcaggaatgagccgatttatcacgtgattggtttaaaccacccctttccttcgcagggcgcttcatggatatttcctcaaacacccaacataccatgtcacgctgcttgaaaatatttgctcgaaaaaattctgcaccctttaaatattccaataacactggcctcgcctcggccttcaattgcagtatgccaatccctttcgcgtcgaaagctcagctcggtgtctgcgtggcccagcaccacaatggctgccaaccacgccgagtataactggatcgagggcgtggagcatcttgaaaaatatcagcctgggggctatcatcctataatcatcggcgacgtgttatatgaccgttatcatgttgtagataaacttggctttgggggctattcaacggtttggcttgcccgagatactcgtctggagcgatatgtcgctctcaaggtcaacatatcacaagcgattccgcgcgaggctaaagtccttaaatctctgacaccttcgccggtacattccgggtatggtttagtgcctgttttcctagatgaattcgaagtgcaaggtcctaatggacaacatacctgctacacggtgccccctgcgcaatgcaaccttagagatgccgcctttagccgtcttttccccctcgatgttgctcgagcactatcataccgagtcgcacaggccgttgcttatacacattcacaaggctatatccatggaggtttgtcataaggatgactatctattttggatactagtaagctaatattatttattgatttagatattcatttaagcaacattttggtcaagctcccgtcaagttttgataagctctctatcaagcaattctacgagaaatatggcgagcccgagatgatccctatcacacgatgtgatggagcgccattaccccctaatgttccggctacggctactttgccgctattcctagggaaatatgccgagaaatttgtattgtccgacgcgcacccgcttctaagcgactttggtgaagcgttttcccctgcttcagaaatacgtcttgggcaagactgtcatacgccagccgcgtttcgggctccagaagccaagttcgaattgcaaatcccgctcgcctatccctcggatatctggagtcttgctaccgcaatatgggagattatgggaataaagtctatctttagcgctgaatatatgcacgaggatgaggtaacggctcagcaaattgatgttctcggacctatgccatcggagtggtggcagcgctgggaaggacgaccccaatttttcgatgactatggaggtccaacggagtcttataagagaaacaaatggcctccgcttgaggaaagatctgagatctgtatacagaaatggagacggaagtttgttggaagcgagattaaggaagatgagaaagctgcgtttctggatttgatgcgccggatgttatcattccggccagaagaacgtccgactgctgaagaagtgctaatgtcagacttgatggttaaatgggcattgcctgattgcgagcggagctaaagggattttcttgtgtttaatactcaatccatgcaccaatagtcagataacaaggactgatgcacagttccctgcataaactggatagcaattgagaatcggaaagtttcaaggtcctctgcggtagtatatggccaatatatacatcggaattctttgaaacgcgcggatataattgcctggtacctaacattgaagaaaagacagaaacacatcaacatcgatatcgaaacccgcgaggcgtgaaaggtccactcttctgtgacattgaattgcaacagattgacattttccaccagaggcggctccttgcacctgtttagcgttgacctgctatgtgcgagtagccgataggactgtccgtatattcttcaagtgactcctcgtctggccaaacaaccttcctagacttcggtccgccacgtttaatgccgtccgccttctccggggtatgagtagcttttgtaagagtatattcctgtttgccgttggtatacccgtgggacgccacatggtattcacgttcgagttgaccctcagtcttgaaggcgaaagtcccgtgccagccttgaggatctatgacatgcttgcccatacgggtagtggtattgtgtaacccagacctgattaataacaagttaaataaagtgggccaaaatatacatatgcacaaggctttggcggggatgggcatttgtctgtgtatcaaggtagaaaagcagacaccactaaccgaatcaatattgccttaggcgccaggaatttgtctcgagctgtcgcgtaggctagggctaccagcgatgccttcacttcggggctgatattgctattaaggtagaagaagattcgaacaaagttgactccctctaaagccgccatcgcttcaacgtccagcagaatagataaactgctttcacgccgaggaaactttgaaggttgtgggttatagcaaaggcatattccgttgaggggaattattgcctctttatatcttgctacttccctgctagagatagatggagaacttgtccacattgttgatcacatctattttttggtgtgatgaaacaagtgagcggctagagagctaagtatagaatatggaatgttggaaattcatggcgtatctgaggtgctcgttaatctcggcgctaaattctggccccaggacgtgatgggtggtttgtacatcgtactagcgtatttcaatatgtgtctaggccattggtgtggtcttaatgctattcatagtttatacagctctaatatctattaatgtactctgtagctttgaaattgaaaaattcagctgaaatctatgaacatcacaatgcttgtgctggtgaatctagagaggccagatattcacccctaaggcatcaattttcatgacccctggccaaaacatcgccctcccttcgaaaactacaccaaccacggaagtaattgctcttgacttggactcgaaatcacaatatataaatacttgtctcgagtggatctggatctagtccaaggattccgacccgcccgtcataattctgtcgaaaaacctgccccgctgtgtccgcggtgggaccagaagacgcgaacttcatacctcgaccacgtcaagaataccattgagttcagacgtatctctttcacgactcactaagaaactcctgattacacaacgcgtgtcgcttctaaaattcagaaacttctcagcctcaccgtctcacaagatgaggattgcaaccctccaattcgcgccgaagctaggcgacctcaaaggcaatattgagaaagcaaatgccttattaaagactggaaagactgtcgctgtaaatggaaaggagcttggggtcggggtcgatctgttgaagcctgatatcttggtgttgcctgagttggcgatgacaggtacgtactccaacaaactcattgagcagcatgaaccccgtctctagcatttgactcaacctgtgtaaaaatttcactggctaacgaataactaggctataacttcccttcattggaagcgattaagccatatctggagccagctggtgatggcccctctgcctcgtgggcgcgtgaaaccgctaggcgattgcgatgcaaggtttgcgtggggtatgcagagattgaaaacgattctcaaaattccgacaaagtcacatactataactcactccttgttgttgacgagaacggggagttcattctcaactaccgcaaaagcttcttgtattacaccgacgaaacatgggcggctgaaggtcaagttgagcgagggttccatgagcttgaattcggttcccagggcgcgctatcttcattgcaccagggtgagcaggttctatccgagaaaaaacggatcgcgacttcgtttggtatctgcatggatatcaatccgtacaagtttgaggcgccatttaccaaatgggaatttgcaactcgagttcttgactccaagtcccaacttgtcattctgtccatggcctggttgaccactctgagccgggaagagctagatgccttgaaggataagcccgagatggatacgttcaactattggcttcagcggttctggcccctgatacaaaaaaggatggaacatgaggtggatattgacggcggagaggcggcagattctccgaagaagatcgtcattgtcttttccaatcggtcgggcgaggagccaccgacggaggataccaagccaccggcgcggtatgcggggacaagcgctatcattgctgtgacgcaacgacccactgtcaatgttgatgcagggtcaggtgcgcacgcccccgatgaggaaagtgagacaaaggatgcgggcatcccattcgacatcaagatactttgctgggacatgctaggcgccgcggaggaaggtatttgtttcgcggatactacggcagatccacaaatggtatttgcactgaaataggcgtctgagtgaggagcgcactggacgcgtcagactattccacagataatgcagagtctatgaagtgatcgagggccctcgcgacatgacattaggaaatggcatttcgatcatccgagtttctgtcatacctcccactcccagaatatacactaaacggtgtatatctcagtttctctcagttccatggcgatcctccttgcaatgagaactccaccgattgccacaggctcatgtacaggtgatccatgtgataggggactcaaaacgtgatgacatatggaggaagatcatcgagatcgtcacaatcttcaggaaaagctcgaatacttagcttaatatcgcatctggaattgtgaggtcttatgatcactcgatcttcacgttcatcaatatgcaggcaagataccagggaagacccttttggatatccgatgcaaccctttggagatatggtggtgtgaaggtcttggggaattctatttcaatatgcttagtctgaaacatgtgattcacctctcccccaccccgatgagggatcagaagtaaatcgagaactaaaaacgaagtatgctgagattgtagaagaactcgtgttatatcacgatctagaccagcacacccaccacataatgcactactttgtttcccattgcaccaccgtcccgggatattccccttttgtgtttcctgattcagttgaaggcagtattcgatacactagccggtctagctaatcactttgcagggaaacaaggagggacagtcgcttccgatcgatgccgggtatattgaatatagttagtaggcttgtggttagtctagactacgccgctatacttgccaaatatgtgaattcatgaagtcctttgtatccgacggtctgatcccccccgtagtgggtgaacatagcccgtgattggcccagaagatacccgtacacgtgatctaggaaccccctccgagagccggtggccaatcagagacccataaaggaggtgtgcagcagaggggcacgggacggctgcacatgacttgcgttgagcgatggaggcgtagaatccccgggggaatccaagcattttagttggttatcttcagctcctgctgtcggtttcgttttggctgcgtttgcaaaattgtctagatcttcagggctcccaggtggctcattcgcggtctgcggtatgcttacgtcagtcgatcttttggaatagatcgatcaggtgattcactgcgctcttggtcgttctggcccgccggactcagcgcgactcctcctcttgaaccacctccttgccacgtgagcaatccatcttgaacttatccgctactctacatcttcctaaagaaacacgctttcttatttctaaatttaccgcgaggtagattgcgaagtattttgcatctcctgctattggcttcttcaaattttcatctttaccaattcgcgcgtctcaatttcgaattcggggtttcgcagacaacgtgacctgcgtcttgttgttgtcaggcaggtgacttcctgtcaggtgataaagagagatcatcccaaggtacggctccatcaatgccccatcttcatccagatttcctcatgtcattgcacctcgcgtcgtgatgtttatcgcaagtggtctccttcacgatgctgcccccctgtgtgacctcatctgcctgcaagccatcatgacgcgctcctgatatctgcaaccccgcggatgtctcgaggcatcgcattacatgcggtcgcttgaaacgtcactgcctcgtagaactatccccatgcactgccgcccgctagaataagactggcgatggccgagtccgacgcctcccggggatgccttacgagcgcgtcggattcacgcgtctgtttacttcgcggggtgcccactatcttcccgagggacttgatctctcaggcatcaacttaccccaggctgcattgacattccagtcatattgttctcttctcattctccgagactcgtttgtttcacttctggacactaaccattaccactaataggacgatccgctttagcgcttagcatgtctgatcccaatatgaacagcccggataatggctcgcacaagcgcaagagagacggctctgaggatctaggcgctgactcgcagcgacttaaccgctcttcccacggaagcaacggcagcatggataaccagcacaacttcggccatggaggcctcggcaactacgaccacgggcttcccaacaccggagccgaactcaacattgatcaacaaattcttcagcatgttggtccgcagaacggcttgtctgatgataacgcgttgactgccaatgctaaggccgccctggcggcacacacccctcaacacaagtacccccctcctcccgattccggcttcgatgcgagcaacctcacccaagggttgtcctttggcgatgatatgaaccagactcccatgggtggtggtcacaaccacaattcgactgctgctgcggtctatgccgcgcgcgaggctcagagtatgaaccagaagcctaccgttggctctcccgaatggcaccaaattcgcaagaacaaccacaaagaaggtaacaagaatccgtctgatcgggtcttgtttgcattgctgacccatgccctagttgaacgtcgccgccgcgaagctattaatgaggggatcaaccaaattgctcgtcttgtgccgaactgcgataagaacaagggcgcgatcctccaacgtgctattgaatacatcctgcagctccaggaagaaaagaagaacattgacgagcaatttgagaagcacagtctgactgctaatcatgccatcgctgagatcagcgtctcgaactccaaactcaagggcgagctcgcccggcgcaacaacatcgcccacaagtggctgacacgttgccgggatgccggcctggaatttgatgattacgaggagtccaaagagctagagtcactcgagatggattaagcttctcagcctaattcttctgcatgtgctacgacttgttgcgttccggaggtcaggatttgaacataccctcatttctctgttttttcaatctgctttgacagatcttttctcttactaccatggatgtttcctccagatcgatctcacctcaccatgaacttctcattactacccctcctgtttcctggaaatgcgttcccctggcattcattctgagtgttacatttcccattgactacccttgcgacttgtctgcgcaattttttccttctattattgctttcccctttgatcattctctgctcacacatttgcggtctttgtaccttactcgggctttgttctttcttttttccctttcatcattaatggattgtgggctggcgaatctacggctgggatgggttgccttgggatggagctgcgggttgataagtcctttttttcgaaactgttttattaaatctctttccttgtaggagttgtgccgtatttgtttaagcattgggataccttcctatccggggctgaggtggccctgaactcgggaggtcccgagcccgagtctcacccgcccctgtacggctctgtacggttaaagcgtcgcacagattggctacgtttaatgcacaatctataggagaatgtattggctagtttctgaactccatatttcggggctttgctttgcgtctgctagtcgaaacaccgaaatcacgggggggctccgcttccaggcgcaatactatacatggccatcaggaggggtgttcctagtatcgccgacagcatgtttgtttccttatgcttggaattaccccaaggaagtatgtgcacggcaccccaggtttcaggactccatctccttcgtgttatcccttgtctcgacagtgatgttctattaggaaagacgctttcatgaatgcgataggacaactgataatttgggcagatgtgttgtccctcggtgggtttgcatcactagcgactgcaggtgcccaaaacaagagcaacaagttctatgaatatctcataaggcgtcattgaagtttagcttcaaacatcaacagccaatactatcagataatcagccaccaaggtcatgtgcggagataacacagccctgatcagcttagatgtcgaactacccctctatgatgtcaacgcggagatccacctcctcctcttctacttaaatctactttctcctagtctcaccactacactacatctctattaactatctcaacatgccttcttcctatatcgtgagctactaactaacacatcccaaccatccacatcttgctaaccctcctagatcacgtgcaagccagacgcaactgacgaggaggtcaaggcgtatgcatctcacgctggtattcgagatacacacacgatgctaacacatgtcttttagcgtcaaggaacatgccaaggagcaaggcggcaaaattggacacgagtactcgttgatcaagggctttgcgtgagttatccagagcactctatcggtcttccagagtgagataggctaattctcggtcttggtgtttacagtgtttctttccctgacgggacagtccacagtctggactcgaaccctcatgtcgaaaacgtcgaggccgatcaggaagtgaagacacagtaatcatctgtcagatgtgagattttgcggacagcatacacagccggaggtcagattcgttagcgtgttgtatcatggcctatttgggttatgaggtataccactgagtctttaaaccagccaactacggatttatgaatagagcaaatgagctatatgattcagacagtgtgaccttgtagatcgacattactatagtagacttggataacccctaacacaggaatgaatccgttcaccaaaccaccacattaaataatatcaacagaagaaagaataaatataaagcgtccgcgctcaaccaatttacaagttcgacgcagcagtaaccgaagtgccagacacaaccgcgacatcctgaacaataacagtattgccactagcaccagtaacccgcacatcaacagtgctagtcctgaacccagcatcgtactcgaagaagttgtagtacgtgcgggttgtgccctgccacgtactaccaccgtcggtgctaacatccaacgcagtcacagcctcgttggcattaacaacctgcatcgagaaccagtacgggccggtgccatccttgttcttgagctggaggggtccgtccaggtcgcaggacacgtatgaccaggtcgtctcgatgacgccgagggatgtgtctgcgagctcggcgaaggcttcgtggaagaggtcgaggtggtcgctttcgcattcggggcattggtcgacgatctggtttgggttagatttagttggttaggacgggatgggagggatgggagggggcttggcttaccattgcgatgatggagttaccactcgggccggtgacggatacacaggtgccgcagttggctgcgtcatcccagcgctggagggagagggctgtgccgaagaggttgctcgggagggtgtagccggagaacgagcatgttccgccgccgacattgccgccgtagaaggtggcttcgccggcaatggaggcaccgagagatacagagacggtggaagaggaggtggtggaagaggcggcagcggaggagctagtggaggaggatgtagtggaggaggaggtaacagaagaggtggtagtcgaagaggaaacaatggaagtggtagaagtgctggtagcttcgacggcagcctgagtggtggaggtctgcgcggcggcgctcttcacgacgggagcagcaatggtctggacaacagcagcagtctcagttgatgcagtgaccacaactgagtcggtcttggaagctgccttctggataaatgcggtctcggcagcagaggttgacgaggatgtagtctcgactgggacaattgaagtctcggcgacaggggctgaagagaccgaagaggtcagagtctcaacaactgcgctctcaacggcagacgaggaggtagtgtcgactgggacaactggggtagcagaggccgaagaggtcgtggtctcagctgggacaactgtagactcgacagtagagactgaggaggatgtggtttcgactggggcaactggggtaggagagactaaagaggtcagggtttcaacaactgcgctctcggcagcaggggccgaggatgtagtctcgactgggacaactgcgacaggggtcgaagacaccacggcaacggcagtagacgacgaggctactgtgggctcagcggagggctgagactcgatgctaaccggagtagccgtcggggtaactgcagtctccacagaggtcgccgaagaataggtatccacagtgatggtcttataatagacgctcatagtatagcccttcgggcagaatccgtcatcttcgcgggcgcgcaatgggcccgcagacacagtagcagcgctaagaagagcggccacagaggccagctgaaggtacttcattggatatatagatggaagtaaagaatgaagggttttgcaagacgaggtattgaagaccgaatgaatgaatggaagccacaggttgactcttaaaaaggacaggacgtgcaggtgcactttaaaagaatggacgtctggataaagaatgccagattcgagagaattactgttccagacagcaagttgggagtgagagcgaaagaaggtatgaaaggggagaaaggatgggataggttagatataagtctaagggacctcatactccgtaccccgtggcttgacgaactagtaatttgatcatttcatagtaagaactacacgctaaacatgaaacgaggcgtgtatcatcagccagtgcaaatgctccggagaagctggaaggggtacttgacccatttcactaggccgagttagggctagtgaaagttgtttaaattaaagagggcaaaaaagaggaaatgactggggtcaaggtaaaatgagattctgttctaaggctattagtggatttgccaaagccaatcggaaaaaaaaactaaacaggactaccgagcatcccacataatctcgttcagcctcagtaacgcatccgcactagccttcttcgccgacataaactcctcgcgattctccgccccgcgtggaccacggagaaattcagagaagcacaggtcgacgagaacacgcagctcctcgtatgtaaatggctcgccgttcccagcagccaaggctttggcgccttgtgatgcaaaggcctccttctcttccttggcgtagtccaaggccttctccgcgccttctaggaaccagtccaggaactttgcgctgcgaggtagggcgacgatttcttgagaagcttgcgcgtgcaaatatgtagccgaatccggcgaatcgccagctggatcgatgatgatgttcttcaggttctgttggagaacaagcacatcaagctgcagtcgcagcgctccattctcattcatggcgccgatatactgggtacaggcgacaaagacccggtcgataaaccgtgccaggcccgatgtgatgaaccagcgctcaacggatccgagatacgtcgagatgttggtgtcgaatgcgatgagatcattgttgagtgcgaggatcgtgggtgatgcagcggttggttgattcatgataatgtgccaccagttgtctattacgtttggggatggagtgacgggttcagagttccgcaggttaggaggattaggcccagccattgttttagtcagcatgtgaatgatgccacagcggatgtcaacatgcatcgtaagaagtgcagtatccgcaagccggtgtaatgagtggatagtcccatcaaaggccacagcagtctcttggttgagtggcaaatgaaccgggttattgatgctatcacgattgggcttcatggacccgaacagagtccatctgcgagacggccggcctgttgcagtcagactggacgactcggaatccgcggtatgttcaaccacaagtcggattctcgcgaggtgacttgcaagccattgcatgctgttgtacaagagcgaaagggaaatgacggttttcgggtcggatatgatatcgtaaggctccaaaggcacttccgtcgttcgcttgaggagaaggtcgatttccgtatcaatcagagtctttttcttgtcccccgcacctttccacagttcatcgacgacatcatgaatgtcgcccgtctcagcaaaggcagccgctgctttcagtcggacttcgcctccacggttccgtgcagagattttcgtgaccattgctttgtaccacccacaacatttgtcataataggttacgatctggtcaataagaagctgcgtaaacgcttgatcgtgtggaatactggacagcattttgctaaattcccgaacaatggacatgaatttgaccgttcctttgaaaataggccgaggggaggccttagcccaatgggggtcttctgtaaatgcatctgcaccaatgaagctaagtgtgcagagatccgtcacagtttcatccaactggggaaggaagacattgaccatgaagtcatccaaaaaggaggtcaaagtgcccatagaaatatcggaatcaacagggacgatatccttgagccgctggatgaaggatagagagggaggaagaaggattcccatattgaagacacttggttcaagcaagatcttatgtccagtacccgagttgccattagtagggtgcggagtatcacttgttgtagccttttgccttgacttggaaacaagtccaggcactgaggacttgagaatctcatccaattcatcttgctcggctttcatctcagaattatgctcaatatcggacaacttgaacattttctataacggaaagggtcagctacttgaaagtaatgagaattactggcctacttaccttattcttatcgcggttgcctgtgtattgatgatggcgagggtcattttcctctgttctagatcgaaaagaagagtccccatcggttgcgaggtagtcgtgcatgagagaccgtatctggcaaagcaaattaatatttgtaatgtcagtcaaagctgttgccttacctcgctttgcagaagtttccacaactccttaaatcctccagaaagcgcctcgcttttgattagaccttctcgatccacaatggcggcaacaacatcatgaacaattcggtggccttccacaattgcctcaaacttggcatataaagcccacaaaaactcagaaagcacgtggccccgtttttcaatgatttccgtagggagactggactgtttgtaattgtcctgggctgagaagctcttggttggctcaggatagcgagtatcaacctctccgttcgtcttatccactactgcaaacagttcgactggaagacgctgctcaattctatgaactgcgacgtcaagatgtcccatcttgttcagcgcttcgatcaataactggatgtaggagaacgtgtcggcctccgggttccgggaggcatcttcgaccataggcgtcaacggatcgaacttggccaggaaactatacacaggccgttcccaagagtgactaccggccaaatgagacgtatgcacatcttttccatcagttgtgttagctttccatcggtccgagcaatagggtgatttaaggtatagatggtcgtgcaactcctcgatcagaatgtctgtgagcgacgtttcctggttgaggaaataagcacgaatatcggataaagcgccgatttcctcaagctccgaacgccgtagaactcggagagctgtgtggagcacatccacagctgcaaggaatcgcttatctgaaatctgagtttccaatttctcgggaagggattggatttcctcaatctgagtgaacagctgtacgatatcatcatagttctgagaggacgttgccagtcctttcaactccggtttggtcgatattaagccggatttagcctgatctagggcatttctcagactgcgtactcgattttgcgaggaagctatattggattggatcttgtggtatgttccaatagaactgttgaatccctgatggtgttctatgacatgcaattttagcatatacatgtcctaacccccacagagaggacctaccattgacaattgccttcagtgtcttctggatgtcattgtacatatgcaaaaattccggttcacgatctgccttgcccaatgtgctcgtgtccatcagactcaaagcgacgtgtactgggacacactcggcatcggtcatgaaatcccagtcgcgctggatagagtggagaatcgctgtagaaggtaaccggattagctattgggccaggttgagcaaaagagaatgtcgtactttcgatggcctgggtttcccccgagtcattgctcactttggccacaggcgacgcattcctctggctcctgtgttccatttggcctcgtgggtccctttggtccctttgactccttccatctctctgatctctccgacttgcatctctagaccgctcttcccggtgcttcctgtcgggatcttgatttcttgtgcgtgaccgcgaagaggctttcgcagagttcgatgagggatgcggggaggggttcgaagacggttgcggagagggttgtcgattcgttcgatcgcgccgtcgatcgggcgactggctcagcgcaggagattggcctggcgatagatccgccggctgaggcgtgtcagcgtagaaaccaccgtatccgccgggccgacgatctgaatgtccacctccacctggtggtggtgcggcacctagtcccccgtatccggttcccccaggattgctgtttgaactgtatcccccatcgttgccatactggttgggaccggagtagccatacccgttaccataaccgctttggccgctcatcgccaatgatacctcgcaatcacggggtgttccggttcggtatggaagcgttggtgggctgtaacaaggggctggcgtggggctgttagccagaaaggttcggtcttaagtctggtgactagcgcgcgacaattggcggggagctgcgagcattcttgggtgtggaatagagggagcgctggaagcaattcagtggtaatgtggtgatagtgttgaaacacgccgggtcgggctccaccagagcttcccgcattccgttccactggccagttgtcggtttactaagaaactccgaaagttgacaatgtaaactgtagatttgcagtatatcattgtgtcgttatgttccttgctagcatcatggtatttggtatttgattaaatcttaattattcatgtctaggtacagcactgaaatggtgtatacactactgtattctacataatcccttctaatcaatagcaggagtactccgtggctatttcaaaccacggcgcatcaacgctgcataccacttatttggaaattggctgggtctcacgcttgagccatgagcgtgtcaggtcgtctgactggaagaagtgctctgtcttcgcccatatctcagcgtggtagtcattcacccacttaagctcggcgtcgctcagaagcgacggctcaatcaagttacgaccaataggagtcattgtaacatgctcaaagcctagccactgcttatcaccaaagttgtgggcagttttgacttcgcgagccatgacaatgtctataaagagcgggattagtatttctccaataacagtcacagactgtacaactcactttcgattcgaataccaaatttgccatcctcgtagtatccgggttctatatcaggaattagttttggactgcaacctacggggaggagagacaaaccatcggaaatgacgtttccggccgcaatggggacctcggtatactgaacccgagttccgataccaatgggaccctcgtggacattctaaacaaagataagtaaagtgtaagatgtttgatgagcgataatactcaccagataggagccaacaccatggcctgttccgtgaaggtagtctaagccctctttccacaagtgttggcgcgccaacacgtcaattgcaaagccactggtgcctttggggaataccgccatatcgattccaatagttcccttcagcactaacgtgaaagcacgcttctcgaactccgtgggaacgccgaagtggaatgttctcgtagtgtcggtcgttccatccaagtattgacaaccagagtcgcagagatagatggcattaggatcgatgatagcacagcttcccttctctgggctatagtgaatgaccgcaccgttgggcccagtcgacgagatagtatcgaaggagagaccagcgaacagatcatgcttggagcgaatttcttccaacttgtcagctccgtcgacttcatccaagacagtcttcttgttgactagttcattttcaagccaagcaaagtactcggtcagggcagcaccatcgcggatatggcaagctcgcattccttcgagttcgacttcattcttcacagcctttgcatccgcgaccgggctacgggtctcttcgacctgtccctcgccaccaaggctgaggctgagagcccaagaagccttgttcgacaacaaaaacttggcggccttttcacccgcagacttgcctttggtgctgagggcttgagcatcagcaaagatggattcgtatggcttgacgataacgtcttgcccgaagtgagccttgacctctggcgtcaacttgtcatcctccacgtagatctcagcggtggtgggcgtaataacagcataagagaaaaacacggggttgtagggaatactgttcggagtcagtgaagtgccaagatgcattatagacactgttcttactcggttcccctcaggttgaatagccaggcaatctcatcgagcatagctgcaatgaattagtcactttgcaggactgggttatatgcgaggtggtcatacagatgatgaatccggccttcttctttgactcaagttccttccgcagctcggccaccttttcttggaacggcttgccggcatacttctcggggtgaacgcgcactttctcgctgggacgcgcggggcgttccttgccccaaatcacgtcgatcaagttctccctgacgcccacgagggatgaaccattctttttaagggtctctgccaacttccgtgcaccagctattgaagattagcgctatccacttccacgccgaagtaacagcactcacacgctgtgatcagagatggatcaacacccacagccttgcctccttgggcttcctccgtggtcctgccaacaaggtcagctcccatacagaccatgccgcataactgtcatctcgtaccattcctgccaagtgggcaccccctccactccacccttcaagagctgccagttgttgtccaattgtttcgcggcctggttgaagtaccgtccatcagtggacagtgcagctttgctcagggagatgattgcagtaccggcggagccagagaatcccgaaatgaactctgtgagaatgttagtgtcggcgcgaatcagcggaagaggggcgatcgttgacctcggcgcgcatcacatggcgcaatgtactcggactggtggctatcttctgagggtacaactatacgaagctggtaagcacaactcgagggtttgagaatagagatgatgtcatactgtaaacatcgaccttgtgctgttgcatcaactgccttagctttgacaggcgttcagaggtatctacgggccccatatcgactgtgtatcgcggaccgaaaacggagaagtgtcttggacgggagacgggccttagcgatcgcaaagatgtccgaaggcaaactggacgggagaggagcatggacactggcggacttcaagaggttactcatccacctgttagctttcgaaggctaagcgaagcagagattgaaggcgtcagataagtacacgataagctaattccgcaggtcgtgtggactccgtgtaagtggccttttaccggtggggagacttttggccgtagggcgatctccggagtcggctacacacggcccacttggtgttgtcatgtttgcactccaatatctacacaattgtatacaaccacattgctcgtttcaattttcttcttgttctttagaggttgatccagcttgagtgctatcgacaatggtgttatactaattcgttgtacgggctaagtcaagcttgataccttgagatatatgatgctagcaatatattccgcagtgagaaggtcagaatatatatcccacgtaggaaaaagcaaataaaggagttcaatacaggaataaagttcctataaatcgaccactccaagagtacagtatgtattataatgtatagtctgctaagacttctaagttctaacatctatagttaagcatatagaggtcacgtgcatacaaaccagatgagccccgcagttaccgctgaagcaaccgccttgatgctgattggccaagagatgcaaacactagattctgcccgtcatagctcccgtgctttgtatatgtacacttctctttttctttttcacaaccacgcgcttgctaaggaaaaatggcaacctgggtgtctgacgagggccttggggccagggagtcgatctcagaagcccatattgtatgcacaccatgtctacctttgaaactcaacagctaataaagaactagctggtcaccgagctctataacccagcgaaccaacgggaccccaccagaatcaatgagatccagacgcgcctccagcaacttcagaagatgaaagatgcatgggcaattgcggattcccttctgcaaagcgaacactctgcccagcatcgtttcatgggggctcttacattcacagtgaagatcaatgtctcatggtacggccaatctctctgatctactacctcgaccgcattcttatatgacgcataatttctgacttcggataccattaggaatgaaatcaaccaagactcggccgcagagatcatgcagcacctgatcaatcgctttgttacattggtaaataatggtgaacaagccatggttgtgagaaagcttgcctcaagcttggtcgccattttcagacaccctgccacaccgtggaaacaagccgtctggcagctggctgcaagccttgcccacggcgggtatgtatccgaagaacaatcgcaaggggtggattttcaggagcggatactgccagcgttgagcaagagtggatcgggtgcactcctatttttctctattgcgctcgctgaggaggctctccgactggactctgacccccaagatgggactggagatgcctcggctacccagcgagccatacacaacattaaggatgggttgctcctggttcaatttgtccttacgaagaccatacagcatgaaaatgcagctggaaatgatgcagttgatatcgcactagcggctgaagccatgaattcatggaaggtgagttaatattggtttcggtacttccatatcgaagagtgcaatcgctaattcgactcccaccttgcagacatggctaggtgttcatgggaatcgtcaacgctctttagctgaagatgtcaataccttggcagtacaatgtggccaaaccgtcattgagatattgagggtacccagcttgagtgaaagtgcagcttctattttgacccaagcctttgaaacccgccgttgggcctttgacgacaactcgttgtggcttatttctgatattcttgccaattcgatcgtgacagctcacattgctgctgtcgggagtggcgatgaaggagcagagagcatgtcgtttgttgacctcttgattgcatatgtctcccatttgaacttagatatattcagcgacccactgacccaacaaaatggagcgatcctcacacttatccacggaattttcaaaactcctggctatgcttccattgatgatctcggaaccccacgtgtcttggagtcttggaacgagatcgcagagagtctccctgatgaactcgaagaagacagccctaggtataacttggtaaagtcacacttagccgaagttgtcctaggtctttccagcaaactattatatcccaagacggaagatttggaagactggggcgaggaagagcggagtgaattcaatgccttccgtcatgaggcctgtgattacttgctctcagcataccccgtcctcggtgtcgacctggtcactgtctttcagagaagcgccacgtcctgcctggaaactcgggactggcgcaattttgagactgccatgttctgcatagctcagctctcagaagctgtggatgaaaatggccacgctgaccagtgtctcgatgccatctttggtagcgatgcatttgctaggctctgcgcaggcggggagactgaattaccactcaaggcccgccagaccctagtggattcattcggaaagtacgaatcatactttgagcgtcacagttcattacttccgggtgttctaaacattctgttcaaatcgctcaactttgagttgtgtgcgcacgcggcttcaaggtctatattgactctttcaaaatcgtgtgctcgcgtcttgacgtcagaccttcctgcattcttagatcaattggatcagttcagaagcaagccgacggcaactgtttccaccatgcctaaggtcttggaaggaatcgcgaccatcatccagagcttgcccagtgaccaggaaaaggtacaaacgctagagagaattctcggcttttttgtgcaggaagccaacacagcacgggaagaggttaccggacccgctcatgaatttggccgtctacgcggacacctcgtgctgagttgtattgctagcattggaaaaggccttcgctcagagagcgaagtcattgatatcgagcttatcaaggaaggaaacccatatcctccatctttctggaattccggaccaggcgccgaaacccagcgcctaataatggaggccatgagacttttgattgtcgacttccccgttgacagcagcataattgaagcagcttgcgacattttgaaagctggttacactgagcgggcagggctttttgtcttccccccctccatgacagtggactttatcaagagctttcccctcggtatttccgggacagatgtcatcatggcaaccgcgtcatcatttttggcatctcacgctcggcatgcgatgaatattcgcaccgaggccgaggcgctcatcgatcatgtagcccagctcttctcttcgatgctccagactccggatgtgtacgacccagagaccgctaatgccggtattgatttcctcacacgtcttttaccaaagtactatccgatattgttcaatcccgtgaagtcaaacctgagcgcagagtctcctcttgctgtgcttcttcacttcacacttcacgtattgacacggccagaaccacttcctcttaaatcttcttctgcattctgggttgcattaatagatctgcagggcatttccccagaagaaatgaacatactcgaatccgtctatcaagagtttattccacgcttgtgctacacaataatccaccagattgccggccaatgcgcaagatcagacttggtctctctaaacgacgctctgcgacgtactgtcttcaagcagatggcattggcgcgcccggctttgaaggctgcgctcgactctttgaacgcccaagttacagatgcaaccggacaacaagtgccgcttttatcggcgaaagacaagtcacggttcttggagtctctcgtcattgctagaggtggccacaaacagtctctggatctcgtgcgttccttatggttgaaatgccgtggcatggatttcgattatgcccagtaatggggcttgcgcattgatacatgacctgatgattggagttgatgggtcctgcaacttcggagtccatttagatatccatttgcatgacatacgcggtgcaacttgatttaatcctacttaagagtttccatttgcatttacctaagcgccataatgagaattttgaaatatcgagtagtttggccacttgcgtagaaaaagacatccgacccagtgggcaaaagtcccaaccaaagttttatgctgtacctggacaaacaatgtccaaagtcccaaggccgatattgctagattcagcgtcagatttgatctttgtgatatatactgcgtgttcttgtctggcaaatagatcgattttatacagatgccatatcatgtgaccacatacccacttaagttagttagccttgacccactaaccttatcctacaacacccgtcgacagactacatatttgtacagactactccgtacttcgtctgcaattccatcactttcttcggtattatccgaacggctaaaatatttgagtagcatgtgacaagactgtttgctcgaggggacatacttcaaatacctccaaaggattttcccgtgattccccgtcatcggagtgtacggcgtaacaaggagaatgacagccgaagctccgattggctgttttccctagccgcgggcaaaaaaaaagccaatcgtgtcttttgctatcggccccacacctccggacatcgtattcgtatactacagaaattgtctttgggtcctggatgattctattaattcttatgtattgccttatcatacattgaagttgttaacatgcaattattggttttaaaatgacaaatgtatcaaatcatatcatatatatgtcacgctagacgcctactcatggctcatgtacaagatttttttaggacacaatgatcaaggctgaaacaactgacagaaaagcacatctaccaaccacggccagccaacttagcagactcgggcaattgcttgacgttgataccaaccatcgcctcaccaagaccctcgctgacttgagcaagcatcttggggtccttgaagtgagtgacggcctggacaatagcgcgggcacgcttcttagcatcgccagacttaaagataccagagccaacaaagacaccatcgcagcccagctgcatcataagcgccgcatcggcaggggtggcaacaccaccagcagcgaagttaacaacaggcagacggccgagctccgcaatctggcgaacaagctcgtacggggcctcgatctcacgggcgaacgcgcgcagctcaggctcggggtcctggctggcgaggaggataccacgggcacggctgacctgcgcattgacagtgcgcatgtgcttaacggcctcgacgacatcaccggtgccagcctcgcccttagtgcggatcatagcggcaccttcggagatgcggcgtagggcctcgccaaggttgcggcaaccgcagacgaaggggaccttgtagccgtgcttggtgacgtggtagacatcgtcggcgggggtgaggacctcggattcatcaatgtagtcaacgccaatggcttcaaggatctgtaggccggttattgttagtgatattgtgacttttatttgcctcccccgccaccgggagatctccgtttcccccctccatctcccccgcatagaggtaattttttacgtacctggcattcaacaaagtgtccgatgcgggcctttgccatgacgggaatagtcacggcttccataatctccttaatcatgctggggtcggacatacgtgccacgccaccctcaacgcggatatcagcggggacacgctcgagagccatgacggcagcggcaccggcttcttcggcgatgcgagcctggtagaggtatctgttagttttttacacactgaatagtatcaattccttgtcagggagatcatacctgctcggcgttcacgacgtccatgataacgccacccttcaacatctgagcaagaccggccttgacagtgaagtcactgccggtggatccgtttggagcagccattttgaattgtgtagctaaaagaagggaatatgaacagaggtgaagagaatgaatagaagaagtgaattagaaagaatgaaaaagaagagaaggattccaaaagtgagtcagtaggaaatacacttttccctcgaaagttacttgcctcaggccaatcacatgcaaagtgcccctccgctggtccctggaaagtccacgactctccgtttcccgagggcatccccatccgatggcagaccgcctgctgtctagggccagtcaccttgttacatggatcttggctcttggcttgacatgcctaatgcagtattgcctgatgcagtatgtgaggtacctctctatcacttgcatggcagatgacagacagcaaactcggggagaggcaccgattccgacgttgactcatcactgatattccactttatcctattctggcaggagagttgcttgctccaagcataacactgtgccgccggtctgtatccatctataaaatatggtccctactatgtactccatacacactgtacacgtacgattcagggtccatcaatgatatgtactccactgctatccctattaatgccatttacgcattccaaatgtatctcccagcagtcgcaatacacacagcatcctaacaaccttggaactaacccaacaacatctaaagttaaagttaacaataaaataagaaaacaacgaccaaacttcccaaaaagagcctcaatctttcccgaggcgggcagatccccatgagctcatccatatatgacgtcacttggcatccccatccgccaagggaagctcaagctcatccccgaccacaaaccctccgagaccgactctccaactccctcaattgcaaaagagacaagcaaaacagacacaatgtccttcaagctattcactcaccaacccgccaccctcctccgcctggggctaggcgtcggcatcggtctctccgccgcgaccatgcatcccttgtcacctttccgctccaccccaatgcaatgccagtacaccactccccatcaatacagccccagcaaagagtcagagtgggctattaatccccccgaacctgggggtctgaagcaggctcgtccgcggcggaatgggctgttgaacgcggagactatgcgccaggttagtttggggagtgtgttggggcttgttgctggtgttgggttgagggcgttctcgaaggctttggttgttattttgggtatgggcgttgttcttatcgaggtatgtataagcttctgcctcggatttggggcttttctttgacttgctttggtgtttcgctggccgaggttatgggttatagttgtgacaagatgctgatgcttcttctcgatcttagtttgctgcggccaaagggtacaatattattccgatcaatcggattcagaaatatatcaaacgcgttgacttgggtcgcgtcatgactgagaaacggcctttcaagatgagtttcggtgctatgatggcgatggcggcgtttgcgaagttctagacttttcttgtttgaagatctaacgctacctgtacatacactcgaacgacgccaagttggacgccaattgacaaggacgcaaattggggctgttggatgcccgattagaattaataaaaagttcattcgtacaggggtatcatgagtcttgatctattccacaacaaatataagggaggatctacgctaccccagcaccagatcctccagcacgccctccatttcatcccgggacagtggcacacctagtatctccatgccgcttgcatccatgcgggaagtgatcatctggtggtcgtggaactcctttagcagggtacggaacatcatctccgaagaagcgacaaactcctccgttgccttctggtaaaggagacggaactcgatgccagtttcatcgccagccctgccgccaccctctgcaccttcatcgtctgactggtggccgtcgtccagtagagtgatgaattcggtcagtaggagacggtacaggttacgcgcattctcgggaagactcttgagcacaaagcccacgccatctttcccgccgacccggcggcccttgcgtccaaggagagtgttgacctcctcgacgacgtcagcctccgctgagaacggtaggaaggttgtacagtcatggaagacgaaattgagctgatcacgcagactgatatcccacatgaccgggaagttgggggtgtcggctgtagctaggagacggatgcgcggtgttgcagccaaacgggcgaggagtgcttggttggctgcgcggcggagaggcggggcatcaatagagttgatcaaaacggtgacgggctcttcgtgcgacttgagcgcagattgtagcagctcgaggacttcggtcggctgtgcaccaagcttggatggtgcatcgtcacccattacggctgtgacgatcgtggcgaagatggatcggatggagatgcctggtgtgtaaccattgaccatcacaatagttggagtcgtagtgtctgacaagcggtggttgtaaatccactccgcgaattcatccattagcttgcgcttggagccgtagccaaataggcagatgttgaacccttcatcgaactcgaatgcccactgcgggaaagatcggtgatgcaaggattgcaggtattccttttcttctttgcacggatccacatattgtccaagcttctcgaaatattcctcatgggttaacagcgttactttgttgagggtggcattcgatgtcttgacaggaccggcgcggttctgaaagaagtatcgttcgtgtgcaggcagctcgccttccggtgtcggggagcgcttattcctcgcaccttttggtcgtccagcacggcgctttggttgttttgctcccttttcaggggcctcttctccggctttaggttctatactctccgccagcgactgatccactttctccgtatcaggcccatctccatgtaagatttcctccgctagtcgttctgatccatcccaagctgcatcttcgtcctgctcgaatagcactcgtgcactcttcttgcgcgcagaccggtctgcattcttaactcgagatggggtcgccgcgattgcggacttggccttggtaggcgtagcgaacaagccacgagccttggatttttgggtgggcgttttcagcccggactgttgtaatggcgtcgcggagacaccgttggcctttttgggtgttgattggtcgagtcctgatgggggaagttcgtaggaggaatcatcgttcggaagtgcggcgttgggcgcgtggccgttcaaggcgccattggattgttctaaagctgtccgttttctctttggggtcgaaacaggcggctgatcgccggtgtctgagagcttacgcttcataacagtctagtcagattatagtcacgtagacgcgaaggagaaaggaagcaacagtaccatcagatccggagaatgtgcacagggtcgagacgcaaggggcttccaaggttggtaaattcaagctctcgtaattgcaaggagctgcaggtctgacacgggaatgtaggactaattgggggttgattgggtctcgaagtgcttgaaggaatgaaattggagcggatgggtttctccgactccgcgtctgaggtttggaggtatacggagtactgccttgaattcaacacaattcgcgagattttacctcgtttatcctcatgtgtgtcgtctgtggtgtttctagttatttgtacgaaaatccttgatttgtactccagagagctggctaaaaaggtcgcgcaagtcatgtgagcaaacgcactgatcagactaaagtccaattgcctagatgttcctcaaagtcctcaacaagaagaagaagcaaatcaccggatattatccccagatatctcaatagcagtgggctcataccgcgcaattagttgccgagtggggagccccgagaccggctactttttctcttggcttaagtttgactcacaagagcaccactcctcataaaagctggggtctacaagcctagcaattggcatagacaggacacatgcttccaactactcaatccgccactatggctacctccctcgcccgcatgctcaagggccaagtccgatgctactccgcaccgctggacatggctattccggcctctaaacagcgctacatccccacgaccggcacctaccccaagggcttccaggtgtctggcacctatgtgggcgtcaaggcctccaatacccgcttcccggatctggcactgatcgcctccgatacgccatgctcggccgccgcagtgttcacaaccaacaagttccaagctgcgccagtgcaagtcagcaggaaaaccctgcaaagccgcaaaggcagtggtatccgcgccgtggtgattaactcaggctgtgccaatgccgtcaccggcaaaggcggtctagaggacgcagtggagatgggaagaaaagtagatgagtgcagcggtgtcgagaatgacagctcgctggtgatgagcactggcgtgatcggacagcggtaaattcaccatcctattaggactgcacatataccgcaccccattgctaacgcaacaaaccactcaccagcctcccgatctccaagatcctcgaccgcattccaacagcgtactcaacgctcgcctccacacacgaagcctggctcacgacagcccgcgcaatctgcacaacagataccttccccaagctcctctcgcgcaccttcaccctcccctcctccccagaccgcacctactgcctcgcaggaatgaccaaaggcgccggcatgatccacccgaacatggcgacacttctcggcgtgctctgcacagacgcggccgtcgagccggcagcgctgcagtcgatcctgaaacacgccgtgtcgcgctccttcaactcgatctccatcgacggcgacacgagcacgaacgacacgatcgccgtgctggcgaacggcgctgcaggcggcgagactgtgcgcgcaccggcggcgtctcccagccccgactacaccgcgctgcagggcgttgtgactgatttcgcgcaggagctgtcgcagctggttgtgcgggacggcgagggcgctactaagttcgttactgtgcgcgtgcgcaactcgccggattacgagtctgcgcgacagattgcttcgacgattgcgcgctcgccgctggttaagaccgctctgtatggcaaggatgctaactggggccggattctgtgtgcggttggttatacgcagggtgtcgcggaggggactgttgttcctgagcgtacttctgttagcttccgtccggttgatgggagtgaggttttgaagctgttggtcaatggcgagcctgagactgttgacgagaagcgggctagtgctattcttcagaacgaggatcttgagatcgaggttgatcttggtggtggtgaacagggggctgctggatgtggtggtgaggatgctgtttattggttctgtgacttcagtcacgaatatgtgaccatcaacggtgattaccggacttaaaagagatgtattttagcattgccagtggatgttgcctaatcgaggaactcatttcggactcgaagcccttttggagcgaggatacctatagttacaaagaagagcggttcaacgaagcatgaatgtgaacaaggttgaggatcatggcaagttgaatatatgattttggtttttctagacacatatggttacaagaccctaagcagggcacttttcatcgctgagcaccacctatccagtaagattagacccatgtgatttcacacatggacgacctaagacattgacactgttgtctcgatgtgcagaggtccctagagaggggcctcggagcgttcatcggcaggctgatcaacctgcacgactgaatatcaatcaatcggtatagttccaattcagccagacagacggcgccaatccattcacccaaaaaagtatagcggacgaaaaaaaagacaaaaataaacagagatgttgcaaaggaccggcgtgatcctatgtcatgctgctcgtgaaaatacggacagtctctttagctgccggggacgaggcccttgaggccagcgccaatgtcaccctcacgggcggcaatttcgaagtagccgtaaatgatgctgtattgagctgttagctgaaatgaacacaattgatgtatcaacgaagtaacttacgtgacggcaagaagaataccagtaccgctgccgagggcacccatgaggtcagaggcgacggaaagaccaccaatgcaggcaccaccgaaggcagcggcagtagggataacgcgcttcagctccttgtacatgctctgctcgcggtgaccagacatgacgagaccctggtccttgagctgcttggcaacgtcccgaggagcggagccggaaacctcaatccaagtcttggagaatagggcgcaagccacaagcatgaaggtgatgtagacggcagtgtgaatggggtcgaggagagcctccttgaagttgagaggaggcgacatgtagtaagcaatacccgaggcggcgtaaagctgagcagatccctcacggggctcccaaactccgagaagctggaccaggatgttctccgagaagcgcgagtacagcatctgactgataaggaagatgttggagcacagagcggactggagcatgatgggcatgttggaggtgtagaagaggcggacggggtatgagccgcgcatgccacgctggcgggaagacttgacggggatctcaacacggaaaccctgcaggtagatgacagcggcgaagacgaggagagtagccaggaggttcatgacgttgggcaggttctggcggtagaacgcctcgtacagggcgcgctgcttatcgggccaggtcagaagaaggtggaacagagcaataatagcaccctcgaactcggggccacggccggtattgatggttgttggggagaaggccttccagacaatcgactcgcaaatgttggtggcaatgaacagggagataccgctgcctagaccgtagcccttctggagaagctcgtcaagcagaataacaacaagaccagcgacaaccagctggacaatcaggagaacacagataccggcaccgagatcactgggctggccgtatagaccagtcagaacgtaaacacaggcctgaccgaaggagagaatgatagcgaagagcttctgggcggtctggtagagctcgcggtcggtcttcaagtcgaggttgacatcaatgaggtgggtaccggcaaggagctggggcacaaaatatgtcagtacaatcaccgcgaagaataacataggagttttttggagtcgcatacctggaagaccatgccggaggagataataggggtgatacccagctccatcagagtaccccggttactggccagcatcatacggagccagtacagggggtccgaagtatcggaggagacaatgccgtaaagaggcatctgactcatgaccaagaagatcatcaaagtcaactataacgtaattcattaggacccaagtcgatttcgcgcggagagggcagattcagggcgacatacaccagtccacatcaacttttggttgaagggcaccttagtctcaggagctgccacctccgggaggaggggcgtaaagggcttgatcaagtcaaggaagcgtactatattcctccatcagcatttggccttcaattgagggcgattcgagacggattgtcgggattgcgcgacgaggtttcgggggactcacggccgctcatggtggctatcttcctcccagtccgttaaagaagtgaagaaagctggagtcgaaaaccagctaaaggaatgaaagtgaatattaagagaaataaaacaaaaggagaaagggtgaagttgtcgaaaggatggggggaggagggaagaagaggacagaagaggtccgctggccacttttcgcttccgcgctaattaaggccacttggtcttcgccgcaacaaccaacttggtgactcaaccaaaaaaaggaacggggtgatttggagagaattgcactactttgagcttcaattcaattctcaatgcatttctcttctgctagtctttcaagtccgatgtgttgtgcaccccccaaaacagggctccaagctatccccacactccacagaggccacggtactaactacgcgatcgggacagctgggggtctacaccctatggtgcaagatatgggggtaattattgggaatcataatagcatacatgtccaaatacatattccgactgctttcatcctataaacatgtaccatcattctataaagagtataatattgccatctttcaaggcccaacaagacccaggcaatcatcaatgatcacctcgagctctcccagtcgattctttaagccgcggttctcctcttgcagaacacccatcacgctccaggcctcggaagcgggcacgccatagcagttggtgcaattaggcgcgttactgttaccaccagcgaaggagctacctaaacgcgttgaggcaagacccttcaagacccgatcatatgccgagcgtacaggtggtggtgtactcgtggccgcgactaggttcttctgtgctggtgtcgggaccgtcggcgtagacagggcgatctgcgacatgttgggagacggcgctgtcagagcggaggtcggagattcgacaccctcacgcagcgagaagatgctttcggcgatgctctcgtcaccggactcgaagcccgagtcgctggtgaaggtgctatggctagcacgcttgcctccacgccggggagtttggagcgccatggaagctgcgtcgtcatccggatacacagtacgaattgcacgactgcgatggcgcgattcctcggtctttcgcatttctctctcctcctctagttcctcggccatggccttcatagctttctcctgatcgagcaccttggcggccatgccgtccagctgcatcttgaggtggtcaactctggcgcgagtctcttctagctcctcctgcttttcgttcttgtctgccaaagcctggtgcatggcaaaggtgcgttgcttataggcctcctgcatacgtcgtagcactttgtccgcatgatctcgtagggaatccagtgcctcatcgttggtatcatccgtttcgggtagtctgagagcggcagtgatgtccaagttcaaaaactcatcatctgctggctctgggaaattgggtttgctcggttgtcgccgcaggccgaagaatgaaaaccgattcgtcgaggtcgagttctgcctcatatgtgacatggatgcagctgggcgggaatccaatccggtcccatctgaagcacctggacccatattaagccccaactcgactggatctgatttcccctggaaccaatctgacaagaccctggctcttgcttcaagcttcttcttcggaaaggtttcggaccaaggggtattctttgggtttgatatcgtgccgtcgatgccctgttcgaacagtggaggccttgcgatatattcggtgtttgctcgacgatgcgaaggcggattgttcaactgatttcgtgcggttctagggaccgacgatcttgggagcgtcaaggcaacggtctcgtgggggtgcgtgccatcggaatgcagggtgacaggcgcatgagtaagatcgggagacatgttctgaggggtaatttcgacagatacacggacaggactgaaatgccacgtcgattcaggcccaatgtggcgttggtgtgcgacctaggggggaggggtttgcggtaggggtatcaatgctgatcaaggacaaaacagacccctggaatatattcaaggtcaaacgaaaaagggtataggtggtttcaatgaagctttcatgtttcacagggttgagtgtggatttgtctagtgaaaccgagaagacgcctcaagagtaggaaacaagaagacaagaggctgggacgatgaaatagcggtggctggtctggagctctctccaccttcgtgatccaccacgtcttcctttccaatctgattaatcagagcaatgagggttgccttccactagacttatttcgagctcgatcccgtcatctatttttgccgctcccgctgtgcatgctttcagctgcacgaggacctgcgtcattgcacgtttctgcaaaatcctagcgtcatggctcccaacagtttgaagcatttatctaacgccctggcgacgcccgatcaactgtctaactcttcgtcctcgatcgacaatgtcccatctgacctcgaaacctctattcggtgcgcgggcgcccagctaactcaagccgctggggtgctcctacacctgtcgcaagatataattgcccaggcggtcgtgatcttcacgcgtttttggcttggcgctgatgggggtagcttgcgaatctactcagtcaaggtaggaccaactcgaggaatcctagccaattcagatccactgaccggagcaggatgtgtccgccgcagccttgtacctgacggctaagctttccttccaaccaacatcgccacgctccgtcctcaacgtctacacattcctcctatcccaagacgcgtcacccttgtggtttgtgaaacagggcggagctccggagacccctccatcccccgaaacctatatcctgtccgagggaggctaccagtccgcgcggctagtcctcctccgcaccgaaacgagtatcctccgtactctcggctttgatacacatgttgctctaccacacaccatcgctttgacctatcttcaaactttgggtgtggtaaagcccgctgtggctcgacgggtcatccagcaccttaatgcggcgttgctctcgccccagcttctttatgtcacccaccaaccaaatgccctggctgtggctgctatctaccttgcttcgcgggaggaggaggtcaagcttgtggacggcgagtggtgggaagtctttgatgtcgatcgcgaagagctcggctttttggttgtaggtatgaagagtacagaaggtttcatgcgagcggaggtcattcggtggaagaacaaagctattccaatggtagtagatggagtggatgtcgaaattgagcgacgccgaatgatggaggagggtgaatgaagcgctttgattttgctttgattttgccgagaacatatattccaagatcaaaagtctactgggaaggatgttctagtagaagctagcaagctatctactagaacattcaccaaggatggcaggcattctacatatcggcagaaggcctcacagtcaaaatgcttgcgatatcctgctccgcgccaagaaggaattcaagcaacgacacccaacactaaaccgccttgtctctgtggtggccaaacaggcggttggaaagttagctgcttccacggcttagtcgattgccagggagctctgcgactgtcaagctgaacctatatgttatatatatcttctcttgtggccgtaacaatcaaagtagatgtatgaataatatttcagaactcagctgacaagatagctagataaattgctgatcataactgaatgatatagatgcttccattctactccatctgctctgctcgagaaacaccgtcaacagcttattgatgttgtcctccaatcggcgctccacattcaggacatttccatatccattgaaaacgtcaattgagctaccctagccccggtcctgttattctgttcgggtacaggtactatggctagaacaagactgcggtgtgcacttgcgactacattgcgaatgacttctattctgttttcaagcgcctcgaggtcggccttggagcatatttcggtcattttgtggactaattcgtccaatgacccgagaagtgaagggaggtcatcatggaagtgtgcccgtcggaccctgcgtagaagctgatacagggcattcaacagcaacttcaccatttctggagtgacaagagtccaatcattgtcatttcgctcacagctgtttatcatgaaacgacaaacgctttccaaaaacccgattgctcgatctcaactcgggccgccgaaggttgcgtacatggtgccaacaaatgaatcaacggagagacaatccaagagggaaggatgggtaatggctttgagaaatggctcaacgtagacaggaatacggcgactccaatcttggccggtggtatcaatagtttccaggaagaacccgtgtccatcaagggcatcatccacgaggtatttgacaaggagctgctggtcccctgtgtttccactatcaagtatctcaaccgctccttcccacagtcgaaggatctcttcttgtcctccccgggatctgacaccgatggaattcgttctcaggatctttttccagtcaatgtatcgtttccgggtgctcgaatcatcagtcgtaggattaggttcagatccgctagctcttgtcaggtcgtgagagaacttgcaggtagagccgtaagtgcaatttccacgctagaatttccggcagagtttgtcgctttgatgacgggtcccgaagttattcgacccgcctcgcttgctggtatggccttcgcctcggaatcgccagtttccaccgtcagccatgatcgtaaaggaggtaatctgagtaagtagggaaaaagatggcagtaattttctagagaagtaagttgctggcacctaattatatggtacgggttatagctaatagcctgtatttgcgaagagcaaacgccgatatgcatcgtccctagaatcatgtatcttgtttccgaatggcgaagcaatcacgctcgttcccggtcttaacctcatgtatacagacaaggtactgattcttgcaccgctatctaggcgatctatcctcatgtccatacaatgtccgcatcgtggccctttaatccacgagacctgcctcaatctcgctaccaactccctcttaatctcgtgcttacattcaccctcttctacatttccgagacctgtggaaaggagaaaggtacattctgcaacccctattctagcgtagaccgaattttccatggaaggtttgctaggtcaagtgactagaaacggaaatgaatcagaagatatatatactctgtatcgctcgtcacgttaacagggcctccggaaagtgacagttttacataagcagatatcatcacgtgccaccatatcggttcagaatgacgctcacgcggggcggatcatgtgctccaccgcttatcatttacccccgccgcttcttctgtaactcttccttcaccttcacctgtaaaacacaatgaatatcctgcactccacattgtcaacttggcgggaccgcctggccccggtatcacgcacttctaccttccgtaataccggccaaatcactcccgaggagtttgttctcgccggagattatctagtctacaagttccccacatggtcatgggccgacgcatcgagtccggcaaaacgagtctcctacctcccagatggcaagcagtttctggttactcgtggagtaccatgtcatcggagactgaacgacaactttgccggggatgcaggactcgaggatgagattgtgagggatttcctatctggcggtgacggcgaaggcacaccggatgatggaggggatggatggttgcggactggcggtggccgtgatgctggggcagaccatgataagcaagaagctcggatccgtgacgtgcgaaccgttgatgaatccgggaatctgggcgagcaggaggaggaggatgatatccccgatatggaggatgaagacgatgatgatgaagccattatccgagagaccgataatcattcagggacacagtgagtgctattttcctatcttcaacatcacctttctcttttctaaccgtgacttgttatcgttccagatctctccgcacctacaccctttacattacatactccaacttttaccgcacaccccgcctttacctgtccggctacttgtcgccatccgaaccgcttccgccacatttgatgatggaggatattgtcggcgactacaaagacaagaccgtgacgctagaggacttcccatggttcgagggcagtgtcaagatggccagtgtgcacccatgccgccatgcctctgtgatgaagacactcttggatcgtgccgatgccgcactcaagcttcgccgtgacaagctcaaacagacgcagtcgcgcgaggaagcgaaccgcgttcttcgggcaggcggcgggctggagggcttggtggatgagaccaacaacctgtcgctcggggactccaacaacggacatcctggcggggatgagtgggagatgctgcaacacgacgaggaagaacaggtcgcgatccgggtagaccagtacctggttgtgttcctcaagttcattgccagtgtgacgccgggcattgagcacgactttacgatgggagtataatttctttgaattgatcaagactcgtcctatccgatctttctatattcctgagctaattggattggataatggctgggatctggcaacctgtcccctttcgaaatctgatatgcatgaccttacatgagttcggcgttaatctgcttctaggcgcatggttaatatcctttccccttccttgggttgcttttgctgtatattatgttcggtagcttgggatggggttcccattgcaattttactacaatttgtgagaataccagagtagacacatcttattgaggtcatatcatagtcactagcattcgaagtaagaccacggggtaccgagaactgagctcgggatgaacaaggagatccatgcattatatcctactcatagatgtatgtaatgcgactatactcaaatttgggcatatttccagctctttgcaattccatcaaatcaaaatcacaacaatcatgacctggcttgtcgactgctttatatataaaaggaatgatgtatccaggcactgactgacgtacagagaggcaagagcgaccttgagggtcagtggcccatttgggaaggtacgtgttcctgggggtataaaagggcccctccccccatttttcctcttctcttcttctcctctccccatccctctgaccatcatctctccgtagcccccatgagacagcgtaggcagagggtgccgtagcacatgctgcttgacctaccacagggatcataacattaccttgtttgttatgaggtccatgtaggtctgcatcagatatcaaaccgggcgttctcgtggatgttcctgaagtcgtggctctcattgccatttgacaagtcccacagaatacatgaggggtgtaaatcttcgtagccgaggacgcgaaggtagtcaccactgcttcacctaccacagggatcataacattaccttgtttgttatgaggtccatgtaggtctgcaccaaacaacaaaccgggctttctcgtggatgttcctgaagtcgtggctcttattgccatttgacgagtcccacggaatacatgaggggtgtaaatctccgtagccgaggacgcgtgggttcgagtcatcgtacactagtcacctaggtacaaggcaaagaattaccttatcggtgttcacattgctaagacctagatagactgcctagagcatctcgtgcgttgaaaatgatgcctggctatccgactgctcgtttttcgcccacagctatcacaacccatttttggattagggtatcccgagctggaatcactgtgaagcattcatgtgtatacgaatcgaaggacacattcatagggaaagtccaataagattgctcatgcgaatggatgctggtagatgtgaaatatataatgcagaggtaaaaccagggttgaatctgtcaggttctgcatgagtcgttttatgtgagttatgagatatatatcttacagatttgaacctcggatatcatatgctgttcactccacttgtacggaaaccgtgcgaagtctcgagcttcctaatgcagtttatattatagcttactctctggtctttgctaccaggctttccaagtggtctgtttattcaggatcataagatctcgggacactcactacactaggtgatcttctgagcatatattcaggcgaaattagagaatccaaaatctaccaggatgtgaaaagcggcggtgtatcatcagagtaatatattctaggtgataataacgatatcaaaagccgcattaacaagagacagcgaaccataagaaccccgaatagtgcaaagcacacccagacgcccaagtgaacaaccatcagcagcagtaataaacaagatcagaaaagagtaagtaataaaaatcggccctcacaaacgagcacagaagatacaaataatccgtgggtgagtacaccagccgacgaagacaaattataaaaagaaaaggaaaacaggaagaatacagtcgtgaaaaacaagagatgcatgcaaaggtccgatcaatcattagatagacctaccacatcgttaacagatggatgggtggtttctatcctggtcatttccgccattttttatcgtgtacgtctgatacaagcaggggcttagttgaagaaagccaggataatggggagagccagtgcgaggacggatccggggaccagagatgagccggcgttgaagacgggcgcaacgggtgcggagggaacggcggaaggtgaggccgatgcggtgggtgcagcagggtgaatcagagggatggagacggagggggcccaagtagccggggcggtagtgagaggagcgtagatgggggtagtgaaggtgggagggaggatggtggggacgtcagaccaggtaggagggttggtctgagcagggggagtgacagtctcggtgggagtagtggtagtggtggtgggcacgacaacagcaggggtggtagtggttgtgggaacaacgacgatggcaggagcagtagtagtagggacgacgacaacgggaggctcagggcaagggtagccgccctggtggtcgtgaacgccattgccgacgttgacgctaggaccgccggggataccgacattgacaccggcgccggcgctgtagtcatcacctgagccagggccgcaggggccgcggtggatgtcctggaatccggcaccggcgttcacagagggaccgccgggggtgccaactttgacgccgctgccagctgaagtctcgctgttgtctgggccctggtgggtggtctcagggccgtggttgacgatctccgggaatggggcagctccgagagcgggcagctggggagcagagaggacggtggcagggccgagagcaaggacgaggcacacgaggccggagaagttgatagtagcggagaccattgttgcggtatgattctttttgttgttgttttggaagaggaaagtggttgattaaaggcgagaactgaaagttgatgaaagagagttgcgaaagagagatgagggaatgactgtttagaaactgtgatgcttgatgaagaacagaagaggaggcgtgaacaatgatccttatgtacttttcgacatccatataaagtgtacactcgaacagtatggtaaggagagccaaggctatccaggaccagggagatcgctgcaaggtacgaacttccttggccttaatcttagaaaagccacaaggtcggtgatctgcaaggcacaaagtcaacggaagctaccaagacaagagatcgtgagagacatcatgtctcaaaggatctgaaacaagtaattagcggaaattagggcatccgagcaacatggttcgatagtaaggagctgcagctctgttgagagactagatgtgcctgagcgagcagcgcaaagcttatgcacgagctctaactcgagcctctgagctattttagctcagctaggacagacagtattggcgggatcctgtatgggatgtagatgggctgctatgggagtacgaaaacacgtgccgaatggggaagaaaggttgtatggatgcaagggataatagccaataaggcacagagacactaagatccctctctgctagagactttccaaggagccaatcaggacattggattaagattgagtgcaaaaataacacgcaaggcactccaacacaggtgagttcaaatgcaacttgctagggctgttgcctgttgcctgtcaagtcaggtaaccccagaaacgaagactgaaagaaatccgaaataattgaaacaaatggggttgtattgcacatatcggcatagatcataagctcgtaaggtatttcgccagaagggagaaagaagctaagaaaagcacagcatcaaaaggatgctgctgagaagtatagaaaacatgaagaaatgcaaaatagacatagtaggagttcacacatagaacacaaagatccaagcatagatgggaaatatgtgcgtccttagacttgacccgggttcgatatcccgaatgcagtgccgaaattagttgattgcttgaacctgatttcaggctgttggtcttggtcagggaactcagattcagaatcagactcattaggatcagccgactcaaccgagcttcccaggatattttttgcttcaactaggagtttctgattcagttgatctaaaaacatggagtcatgctcctcatcattaatcaaaccgagaggccccttcaaaccggggtcatctggcacatccggaaagtaggagaccttattttcggagggttgatgaacttccgttgtcacgggcgcaagaggggcgtcctcaagctcgggggcaacctcgaggggagaccccggctgggtggaccgactatcatcggcgtcgatgatcgccatcggggtgtgacctgcatggcggagcaagttctcattgggcgggccaagctctgacagcttcagtctgagactagctcgatgttccataggaggccttgcagcggcggtagggggaattccaggggaggttcccaggggcgatggggagggcggggtgatcactcgagctactacggcaggtggcagcgccgtggacttgagcgtgatgccgtccaaggttctgtcaagcttttcgatcggcaccggcagactcacagtcggtccagaagcgtctactggtcgcgaccggggcgagagggcccgatcaagggatggtggatccccactttcggatgttggcgatagatagctttggtctggcgattcatgatcgaagaacacccttgttggccgcgtgcctggacttgatccctcccacacctgcgctgcgaagccacttgtgttgaactgcggtattccacccgcaagcacatgtttgacggcttccgatcccaattggtttgttctgttcccgtgactcttcacgaacacctccagctcggcgatttttgatcgcagcagcgcgcgctctttctcccacaaccgtcgttcctgtgcgaacaattctctctccgtctcgaaattcacccgttggctgtgaagaagcgatcgcgattggtcgatataggacgtctccatagcgaacgaattcaccaacaccgagtcttgcaatgcggtttggccgtagcctgaagggacatgaggaaacgtggctgaaacggattttgtgcgacgtagtggttcggtcggagagaagcgcacttctttgtagagactcccatggccgtctagtagtttggtggacttcatgtctgaaatgtgggtttctctcggtgggcgcaaatccgcagataagggctctattagggataaacacgctagtagcgtgggatagtccagtgcccaacctgcagagcttcggctttccacgtcgagaccagtcgagttcctaaaagcggtcaatgagttcacgctccatctaatgggatttcatgcgaggttcccgatatggcacatgtcaagcctgcggtgaatggacactggttgggcaggtttgggatttgggtagcttttaggtatgaaggccccatatgagagggggagatgttagactagatcgtgaatatccacacagattctggggaaatgcagttacaggaaaggggcaaaagggaaacacctggccaagttccaaaaagcaatgtgaatggatgcatctgatcacattttatgacgtcaaaggggctggaataggcaatgtcattaataagatgatgtcgggtgagtcagaagatgatacattaagttgagagtatatcagagccatctatgtaagtgatatataacaggacaaccgggcaacaaacataatagatccgtctataagctgccatggaccaaattagtataaagaagaatgaaagaagaaaggagagtgtcgaaagcccgcccaacgccgtttgcgccaaagatgtgccacattagccattataatcagcgctcagacgtcatgacgcaggctaaaagatgcaaaaacaaaaggatatcaaaagacacaagttgtaaaaggagagggaaatccctcagagaacagacgaggtgggccgcagccggcttggcgccatttgcttcttgaaatccaaagaccaagcagaacaccccttaatagaccgatccgactgtctcatcggcgaccgactgcgccaaacaaactgctgcgcctcgtccagcagatgctgatcgccagtcggcagcggatagaagctgacatctttgcacaaagcgccaaagcgcgtcgcaaggtcaaacaccccccgggccgtgagatcccgaccacccacgttcgcagacggataatagtagcgtggatcgagataaagcagcacgctattccacatcggaagcttctcggacagaagccgtcccgcggcctcgtattgttttagcgtgcgcttcggcacgccggtctgcgtgtgcacgaagaagaagatctcgaagccgacgctgcggatgcgggcgcgggcggttgcgctgagcgtgtccaggaactctgctaatcggtcgagattgaaggagttgcggaggaagagcgtgtgtgttgagtagaggtagtcttcggcttcgtcgtggagctggcggttcaccgctaatagcttgcgcgcggtgccgtcttcgccaacccagtgaggactcattgagattgcgcggtattggccgcgagctgtgaaggtgttgccgtgatcggcgagcacgatcattggtttgctgactaggtaatcattgggtacatctagtgcatattcgtagatcttgagccggagttcggctgggagttggaggagccgcgatggtgatgtcgatgttggagtcggagttggcctcatagctgcttagctagaagaaagaatgaatgtcgagcttcttgcgaaatgcggctgttgatccgatttaaaaggcagtggtaccactcgggtgtatacgtcgccaccgcgagaaatttttcgattcgtcggaaaaagtcaatgcggaataaaaatagaggtctgtactttggacacagtactcctagatggccttgcatcccgagaatgcaaagaatcagaccatgccgacctatgatacgaggtgccgagtatctgatcggcatctcgatgcctatagatatcgcagccaccacgtatacttcaccgcatgttacatcccgatcaagctacggagtacagcaatgagcttactaggatactctaggcgacttttcctgggtatgctttaccggattttgatatgataaccttggaactttggttgtatgagtcaaccaatgttgtccttagtgacggttttaggatccgatgttcggagtataaaacagtcatctgcctttcttacattccttcttgctttagacctgtgactagctctattcgatatgaggcaaggagaaacaacgccaagcaacgttgaggattttcccaacacacgtgcaatcgatttgctctaggcctcagtcctcctaggtatgtaagaagtagattgccatggacccatctctgcaacatgcaagtatgggtcgagtataggaaaagatgatgcaaagctatcattcattgtgccattctctaaaagtaattctctttgctctatattgtagcgaatgttcgtaccttccgaagctatacatatatacttcgtacagatgtcaccgcctagtgatatctggcgaatcttcccccaaggcttcatcgtctgtttcaaggctatgaagcacattaatagtcattctacaaccataaactttaaattagttaatgccggcgtccaagtctcattgccgactggatcgaaaacatatccgcaaggggccaatttaacggtatcagcagccatccaatcctaccagtcagttctactgccccttttctgtagcagactttgctagcgatggaaagagaaacagcatagctaacctgatacggaaagatggtgcgagcccaggcctatcaggctctttgggcaggaaaaaatgcccagcctatgtatgtaacccaagaactatagttaccagtagtcgattggatcatccacggccaagtaaaagccgagtctccaatctccaaaaattcaagatgcaatctatttgctatggaaaactgtccgaaaataggaataatgaagttcccggatcatcgctgtctatacacacccagcgaccaagctgcccgcagaacagccagaccccaagccatgccgatactatctcgtaagacattcaatttgctacccttcacctccctccacccgacaggaacctcagccacagggatccgagcgaactcagccagcatgagcatctcaacatcaaagatccagccttcggaatgcatatacggcacgatgtaaggtagggcactgcgggagaacaacttgaacccgcactgtgtatccttgacagtagccgttttaggaggcgtcataagccacaggatcaaatggaacgaatgcatcaggaagtttcgaagcttggatcgctatcgagcagtcagtaatcaatcgcaagcctcccacaacccacaacccagatatcaaatccccataccttaaccacagcctcactcccaaccatatgcgcccgcgacccaacagcaaccgcgcgtcccttcgcatcctccacatcccgacaagccccaaccagcttccccagatccccgaacttgctcgctccatccgcatccgcaaagacaacatactgcccccggacatggcgcatgccgtgcgtgaccgcgccgcccttgccacggttatgcgtcaaggtcacgacgcggatcgtgccagacgggatatgaacgccctctgcagcctgcggcgtccacggacccgcgtgtcccttggggtggagagagagctggtggtcgcgcgcgaagcggaatgccacttcctccgtgcggtctgtggacccgtccgagacgaggatgatctcccagccgcggtctgaggccgagcccgcgtcgctggtggtatccgcgttcggcttgcgtttgcgcattgagcgcgtctccattgtaactgggctgctggccctggcgagggcgctggccgtgtccccgtacatctgctccaggtagttcacggcttcctccagcattccggtcaatcggtcttcctcgttgtaggctgggactacgacggacatgaatagctcggccggtgcgattgtgtggggtgtgctctttttggtgtggctttcgagccagcagggtaggggttcggggtctgtcacggatccatctttggcgagggttctatactttttttcttctgggagaggttttcgagggactggcgcaacgaaaaatataaatagtgagaactatgcgatagcaagctggtcagtaactttcaattgggctgcgcgtgtctggagtgcctccgcgcgatctggtacaagcggagttgggtaaacgtggactcaccaggacaaatagtcctagcaaagtaactagggcagcgacgagtaagatctggactgggatttccaccgcagtattgacgcattggcgacagacctcgccccaagctgccgccattgtagagagtgacgaattggacgtcagatgcggagacggaagaggtgcggatagggagggtgagtgatgcccgaagggagaaggcaagcacttaggtcggagagagaaagtgtttattcatagaggtaaagcagaatgatcctcgccatttgaaaagagagagggcgcagaagggaggggaggaatgttgtaagtcgatagtcgccagcttgtccttttatcagcagctcaacgcgcaagccaatagatccacatctaggagccacgctgcgtagacgctctatttttacagtgttttacttattatagcttctattataatctatttttcatattctgttacggttcgcgtatattgtagcgcatttacctctttatacgcgtttaccgcgaatcgcatggaccggccagcttgtagaatggacattggctcataagagctgcttcctgctctatcacattgctcttttcttctaatatgcgcctcgtgatgttctccaatgggcaaagctagaggactgtctgtagcaaaagaaattgacccggagagaacatgatcatggtgcccgaacactctccggccatgcctatacaccctccataaaacagcgtgagtaatgagacaggggagaaggacaaggggattgacactgaaagcttccaattttaattcaaatacttttgttctctcatctcatttttccttcttcctctcactttgcctccctagtctttgcgggagtactctttgattctcgcaacaatcgttcgcccaactggcaagtttgaaacaacgcatcgagaagccagggatgacttcttgctaatagctctgaatgtgctccttctggatagaagaagtccgcagtaacccgagtccagaagggatcgaagcaggcctcttggcttctaacaagaccaatccaactgcggtggaaacagactagaaatgctggccagagttggcgaatagtatggaatcagacggacggaagagcattccggggcagggatcctttccataaatatggcaatatatgcgacaatccttggacggtccagtcattgcagagaggttcgtatggatgcaggccttccaggacagaaagacccgagttctgatatctgtcgtgaatgtggtctggcgactcatgaatttcctgtctggtaataacgcaagataatggtccctatctggcttcgtgtacggaaaggacagagcgaacgatctggaggcttgagcactccatttcgaacaagaaaaaaaaagaaactctcaggtttgaccagcgcggacccgtcaagacgcgcagccaacgtcgtaacggaacccgcagcagtcacccagccgcattttcaaacatcctgcatttcttgattggaagaggatagctcaatatctagtgagttaggattgccatagagggaagccggtgattctgccattgacgcaaattcctctgctaatcgggtgggtgtgaactgtcgcgtctgatcgtatgtcatccagcgggtgaactagtatgatggtcagtttaactgtgctgataggaacaagggagacaaacagttgcgatccgcactccaagccaaagacatcgatgtcttctagtaatgactgctgaaggttcttctgttgatggtctgttatcttctgtaagagccccctcgaagaacccttctgggtagtaaagccggctccatgcctgtcctctgatcaaaaagtcctccggtaactgttgtgtagttgagtcgttaagaagcgggaatgattcgtcttcgatcttcgaaattatcgtgtcgggatcgaacaaggtgttcagataagttgctagtaacgaccacggaaccagcggttctagtcgttgtatagccgctgggttgagtgtaagagaccacacaaatgccatagagatatgcacactcgggtagatgttgggatcaccgacttgcccgagcatcacaattaacgtgtgaaatgcgagagagctcgcccggaatgcaagctgagacgacaggtcgctatatgtgtcgggaacgggtgtgttcgtacccgatgcccacttcattgccgttaggcgttcttctgctgtaggattgcgcgacttcaatgtgaaaaatttttccatcactccatctttactcccatattgaagtattgcgcagatattgcaagacgtgagtaggacacctttctgcccgcgcacccggttaatttccttgcgtagaatagtaagaaaaaccttctcccgagaaacgaattcctcaaccggagcttgcatgaaaagcgtaccgtgagtagtcacgaacgaggtaatcaaatcccctttttgagctggcatattcataagaggagtgaccagctgaatcatgctatcgagagcatttgggaatgcgcgcacgctgatcaatgctttcgtgtagtggaaaaactgctggagaatatccgggcaagctaaaacagcaagatgatgctggatgcggccattctctgcgcttcgatctgcgtcctggttataccaatacctcgagacccctacccagagttcgcggaccttcttatcgaattcctccacggccatacggtaccgtgctaagtcacctaggcactcaatccaagtctttttaaaatctggcacgctttccagtagcaatgttattatcgagtacgagaggtagatgaagtcgatcatatgctccatcgagtcgggggttttccggcgcaacagctccaagaataaatgtacgccatagcgccacatgcgcgccggcataccgtacttatcagctagctctttaagaacaggaccagcagacgggtgccgggaggcgaggaaaaagtcatgatgttcgtagagtagtgttcggtgtagcgagacgagtgtctgccactgaccctgtgatagcttggcattcgattgcgcctgttgtctatcggtttcgatgcacttcttttccacattgacaacgccggtataaatcccccgcacttcgttaatcagttgctcctcggtgatggtgtgcgtctccagctgccgaaacattccatgcggttttgcttcctgactgactgcctctgccatcttcacattttgattcattatttcgtcatttttcgtgtaccatgacttctgcgcctgcgcttgattttgcatggtctgggaaggattcttgatttcaacggcattttgactgcgcacagcaacgggtgttgaatgtgatctctgcaaatctggacgtgtcgcaaagccttcccgcgcactgatcttgatttttggatctgcggggtcatttataccgtgtggcacgccggcctttagctgctgagaagccagtcttcgagatgaacttatcgcaaagccttgagataactgcgatttctcttcttgcctgggcacacggatctcaatttttgaatctgcggggttttcatttatgaagtgaggcacgccggccttaagccgctgagaagccgatcccgataaccgccgagactctctagagaccagggagctgccccgacgacgagatttgccgacatgccctgcacaggggcaaatggggctcctgagagctcgcatgtcgtgactactacgtgttatcacagtgcaatcgtctcctaggacgccagtcgactttggtcgagcactggatatcggcgagctggccgagcagcagccatgagtacacatcgattcagagatcaaatcttccgacaatagtcttttcttagatcgcctgtataaacggttaaggataagcaacaaaggctggggtcgcaacatgcctacctaggtgacacgtcgctacggacaactctatctgagagtcttgtcttagcatccagctggctgtaaaaattgcgtctggttagtcttgcctccttacggcacagcttgtcgcccattttcacttaaggagaattagttgatcgtttgagccttgcgagtgggcaacgtacctgataagaagaagagatatcccaaatctcacatgttgtcttggagaccgggcgaatatatagaagaggcggagatatagaagagggttaaatagtctgtttgggttaaatcgaaatgtagtggcgtagtgggcgcctgggtgtgtgtcggcctgcgtgccgatcatcatacgcctatcattctcgtattttaccatacccaggtacgaactatcggttgcctaacgaattcattgcttctatccctttagtccgatctccatgctactgtatacccgcttctcgccaagcaacctaatccccgaatcccctgaaggagttagcctctcccctgccatgtcactgccttaatcgcgttaggggaagcagacaggtcatagccgccccaagcatcccagatctataacttcctctctttttatgtacgaatcaaatatcattgatctgcaagagcttacgaaatatatcttattcgaaacatttgactgcaatcaacagagttcaggtctacccgtaattgcccaacttgtctcccaatatgtcagatacggcatcttacgatttgggaaaccttcgcgcctgggagtgaacacggggtgcccttacagcgctaggacattgtctgctcggtcaccgctatttggctgaatttgaacacaccggttcttgaccaagcttgagcatagaccagggccttcagcccaagagcctttgtttagccttggtttaccctgggcactgggatgaccccggtcctttcgcattgagcactatagattacgttcctctttctcctagaatgaggcaattcttgcaccgggtcttttaagttattagtgtttagggctcatgtcacgctcttattaccggccttcgtattaatcattaatcatcaggtcgagattccttaaatatccggtgactggcaatcatgcaaccgctcacggaagccgacagaatatcggaccacacagccttgaattgttaaaacgcctaggtgatggctatacttagacggggttgaagctatggacaggggttatactgctacctaatccctatttatctccatcgatacggatacctaaccaggtcaagatacatagttcttagcctagaaacggctttatcactcacatccaacgtacactagctaccgggcctaatacaaatgtggataaaccgggcgtaaacactccgaaggctacaaaatactcaacgtcatccacctgtcattcaaatctctctacaactgtactttgaacctatcaacaccaaaacaagtggcttaggatgacgttagtccatttctgcgtttcaaaaatcttaggcagagctgcctaagcctatcgcgtaagcgcccgtaccgattggagggtgtttaaggtacctgtacctacttcgtatgaaaaacagcatgacctgcatatgtaggatgtaggatgtagtcagtttcaattctattaactcccatgcaagagatacctattccaatataatcaatcaacatgttgtccaatcccgtgccacccaataccaacccgggtcgcattttacagcgaggcaacttccgcgatccactaacccccgaacaaagggatcccgctcgttaattctacctcccttcgaggaaatcaacttcaacggaaccgctgcaagggagtggtgaggtgatattactgcaagccacacgggaggaagaaggcaggaaataccttgattcgtcgcccgtacctgccatcacccgggtgaagggctatttctcggtccggcttccctagtcgagacattctatgtacgtacccagttgacgccgacatttaaaatgttagtgtaaaaagcttgcatgggatatgctcgttgagctctagcgtttgaagtggggaagacgggctgcagatttcacccgggtgaaatagttactacgcgacttctagagtttcgggatctgcatggataaggggtgtgtgcttgtctaaaacctgggtttgatgttgcatgtcgcaccctgtgtatggcgccctgtgcatctgtggggttcgttgatcaggcaaagctcaatgggctcgggtcggttttgtgtaccttcatatcctggaggttctttttcttggagaatggtggatacaacctttggattatgcggcgaatttgtgtaactattgaactaggctttctttaagctctcatagccgggtcatgctatactatcactagtcattgctggtcagtttgcttttcttggacacaggcgattcaaggcaaccccacattttggagattgaagagcaggtctatggctatcggcggattcactctaggcagcgatgtagctatacatactgttgaccgctgctccaggctctgtcgggtgaaataatctctcagccacatgcaggtttctttgatagccaatctagtatattgaccaacgaaataacgaagaaatcacttcttaaaggctaaaaggccgagaatatgattctcaagtggtagacccaatacgaatatatattgcagaagataaaatttgtagacaaaattatgcaataaaagggggaactatataaattccgaactgatagctccaaagttatgaacggagttctatgattaattcataacataatcgaagcagcaatttcacaagagcaaaattaagtacatattcacaaggagctttagctacaatatatgcgatattcgaaatacattcaacgtgtagacacgaaaagaggtgaaatcaagactgaacgacgtcatcgaagcaaccttgaaaacaatgattcacacgtccactacgcgctgtatccaaaacacctaaccaagtctcacacataaaccaactcaattgacagcttaatattatctgacccgaattaatgaactccatccgccttgccgcgcgatacctcaaatcaacgcagcccatccccacacaccgaccaaccaccagcatcacacaagccacagcaaaaaccgccaaaatgtcaacattcacactccccggctcaaatctgaacgtgaatagcatcccagatctaagcgagaaagacctcctctcattcccagccttcaaaacctggataacaaccctccagcactctctcgcgcgacaagaacacccctcacacgagttccacagtgacccatatgtactgcgcaaaatcgacatccaagccgtcgaccgcttcggtggcgggcgattaggcttcgtcaaattgaaagcggatgtatcgaatagccagggcgagactctgccgggtagcgtatttctgcggggtggcagtgtcggcatgttggtgagtaaagttgtgttccatttctactcgataggaggttttttccttgatactctatttcgagatctagaagaaaaaaaaaaagaaaatattacgccctagccccaccattcgaaaatagatggcttgttctaattctatgcatagcttatcctccacccaaatgatataccaaacccgactgaaaaagataagcgcgttatcctgactattcagcctcgcattccagcgggctcgctgtcgttcgcggagatcccggctgggatgctcgatgatagtgggacgtttgctggcggggcggcgaaggagatccacgaagagactggcttgcgggtcgagcagggcgatttgatcgatatgacctcgctggcgctgcaggctgcacaggaacctggctacggtgagcgcctgcaggctgcggtttatccgtctcctggcgggagtgatgagtttattccgttatttttgtgtcagaagtctatgccggtaaaggagattgaggggttgcaggggaagttgacgggattgcgggaatccggggagaagattacgcttaagattattcctttggcggatctgtggaaggaggggattagggatgggaagactttagctgcttgggctttgtatcaggggctgaagcacgaggggttgctttgagggaataaggcttggctttgctggtagatttgtatttcataggggtttgtttgtaccaatgtatgcaagctagtgagatatgaacaattactcgctcacaacttccatttcttcgccagttcaatgccctcagctagtgttcctatcctggcatcaatagcataaccttctttctcaagcttcttcaactcgtcgaacaacgacgtcaaaggaatagtaaagcattcaatgaactcgttatcctcgagctcaggcttcgggttcttgttctcgggaagagacatatcaacccggacgtggaccatatgcaggttggtattgcaaagtcctgggtctgatcatcacaaatgtttgtcagcttcagctttacaagtcaaataacctgccagaacaaaacaaagcccgtagccaccacgtaccgttaaacataaccggactagtctgctcggcaatgccaacataaccagtctcctccttaagttctcgaacagcacattgctcaggtgtctcgcccgcatcgatgagccccgcaggaacctcaatgacaattgcatcaatgggtgggcggtattgcttctgcagaagcagctcctcgccagaatccttgttcaaaatagcgacgatcccaacgccatcaagatcgagcccggcaggacgagtctaggaaaacgcggttagcatcaaatccgaaatctaaatttcaaaatggaggttctaatagattgttggagttgggtgaccaagatcgaccaatgggtccggtacacatcgcaaggcaaccggtcatgtggttttgtttgatacagagccaggcagcgcccgggtttatgtcacctgttgacgtcccgggactggggagccccactaatgctagcccccgtttcgtgatttagatgaggccggatcttagttgggtggcttggctcccgtaacagtcctgcaatcaggtggatccctacgataggtgtgacgcatataccccggacatctaccaacagcgcgcatagtacaataagcacagaacaagggataggtcttaccgtgcgctcagctgattcccatgttcgctcgacacccagcgggtcggtgtatgttgtcttgaccattcgagcccagcgggcttcgctggggtcctgtttggtggaatgtgtcagtcgtgcattggcccttttttggtgatatcctccgcgctctgtctatataatggacttgggatttgctgaagagacccaagggagattaggaaaacgtaccaatggtccccgcgaaatgagtttcgacttggcctgtacgcgagctgacattgtaacgagttggcagtggttcaggttgaaagagagattcaatccgatgtactccatatgtattagactgacgttgctcgatcgaccaatagagcgggggcggggttagcgcggggttagcccttatcttatcagtctatgactgcagtaaggtgtccggtacagaccacttccgcactatcaagatacttgctatttgctttgcttttatttcatgcagctgcatgttattcagcgcactgaataaaccccgtcctgacctcgatcagcattttggtactcatcgcaaaccccgtcctcaagcttcacattttctaatcatcccctataaactggcaaaattcggcctcttagctgctgtggctcgtccgtggtatatattttgacttcagcatggtagttctcaacacagatgagcctcaaagcaaatattttcaataccaactaacgtcacatgtaggcgtagctgtgccctgtcagggtccatgggtacatacataacctgaaagtacacattcttttttgaaatttaaaccgattcctattctcctaccaccaagcaatagcattgatagcgcttatcgcaatggtacccgaagtacaagatatcgccgctcttgagctgtacgaagccgtcggggaaggtcgcatcgaccgcgttgaatctcttctagcagccggcgtcgacccaaatgcacgattcgacaacctaggttccgttttcacaggagtcgccgaagactgggccagcgaagacaaaagtgccaggcctcctttgttcaaccccgaccagactgaacaaccttcccttcgccgagccacgggcgagtccgaaggttcatgcagctatctcgataagcccaaggccacgcgtcttatgaatgccctgctcaagcatggcgcagacccgtatgcgctatatcggcagccgatcctcaaatatcgatatgtgcgtctttaccccgggcaaacaagagacgaagaggtagatgacgaggcgacggaccttgatcagatatgcttcgcccgcaggggaatcatggaaaaagccctccgactggaacggaaacggcgcaatctcgagcaaggagtgtacgatcccaatcgggacgaattcacaagcgatttcgaaggcagtctcgacgatgtcattgagtatctagatcttcctgtcaattacggcgtgcgcagtgttatccatgcactactcgagggcggcatgttcgtccagcctatattcgacttcctaggggacacgctggatgtcgaacgacgagatccccagggtcggacgctatttcttacggcgtgtcggagcagagttggtccagatgctgcgacaagtggtgtctatggcggtctcagcacaataaactacgacactggaatccacgagaacccctacccccaaccagagaatccatggagggagttcgaagccaagaactcgaaggcctgcactgggccaacgttcctctccttttccatcgcacgtggagtcgatctactggccgttgacaattacgggaaaaacgccctccacctgctgtttacctatacagattgcgcttggataggtttaccaccgcctatcgatactacacttgcgcacctgatcgaaacctgccccagtcttataaaccagcctgacaaggctggtacataccctttacatctcgctatctggcaaatgaactccatcatgattccagcgcgaaacagtccggcatcaatctaccatttcgaaaccgcggtagacgcccttctcgctgcaaatgccgatactgcggtccgagacgggcgtggaaataccgtgcttcactatctggctgggagtagactgggagaaaaggatcgaatgggcgatgagcaaaggcggtttctgcggaggtttcttgaggacggtgttgaccccagagcacggaatgcggaaggcatgacggcactggagatcttctgcacggtcagctatgatgaatttggtgatgaggggttttatgaccggtattttgccattgggcaatatgttattggccagtttgaaaaggctggctacgacatccaggagacgaattcgaaagggcagacgctgttgcatttggttgctgggctcaccgcacctgaggggatgtcttgggctgcgtggccttggtttcaactcctccggtctaagggacttgatcctatggcgaaagacggggaagggaagactccgatcgacattgcggaggagaacgagagtatcaatgtttggttgcaggaggaacgtgagtccatggccgcatagccgccagtgatatagagtactcttttacgtgtctgcaaggtcgctagaatataattccagcaccagcgaaccctttataatggtattaaaacttcaaataactttaaatataaaataaacacccgaataaccaataaaaaggtatagttaatggtatctcattgcgcataaaaacctggttataaagacggagatactaaagaataatgcaccaggcaataagaaagtagcaatgaccggacacagtccagtctcaggcaagagttgtcactctgtgtcaaaagatatagaaacaccttttgataacggaaagtggcaacagaaaagagtccacgatactggagtggcgtgaaaccaaagaaagaatagaagaaaaagctccatagcggtctacgctcgctctcataacatcgtgggcataggcatcatcagcgagagtgtctttaaagggtcgactggacatcgacgctgacatcattctcgatttccttcatacacttctcaaactctgaccaatgatacatgacgctcttcgcgccaatgtcagtcagggccttcgccattgccttctgcgtatcttcgccattgtagctgccaacgtacgcaatcacgggaataccggcacgaaccgcagaaagagcaccagacttgctgtcctcgatggcgacagtctcggaagcacgcttgccgacctgctcgagagcatacaggtagatagcggggtcgggcttggaggtcggctttggcagggagctggcggcgctgaagaccttgttctcgtcaaagaacttgtcctgaccgaccttccggatggaagcgagcacgcggcgcaacgcagacgaggagacgacggcaagaccgtacttcttcgcggcgaaaaccttttccagctcctcggtggcaccgatgcagcttttagccttggcgttcaacttggcaatgacttggtcctcttctctgatgacgtattcttcaagcttgtcctcgtcgatctggaagtcatatttctgctgtagagagatcagcatgccgcggaagttctggccgacaaagtctttgatgagttggtcgccggtgtaacggtcggggatgttgttggcctccaggatctcattggccagatcggcacaagcctcgaaggctagctcctctgagaggaccagcgtgttgtcgcaatcgaagaagatttccgtgatctgcagtgcccgttagtgtgggtctctaatgggatagatcgtgatcgtaccttagtcatgatgaaagtgcggataatagatccgagtgtttgtttatttgtttattgagaggggatgtgagtagaagggcaattgggaagtgtggtatgacctagaagagtgggagttggagagttcgagatggagagaagaggaatgccagaaggtacgagaatcggcgattggggtatttaagtcgaggcaggacccccaagacatgacgccgcaatcacaatatcccaggggaaaccgggccagggcgggaggggctggccattgacgtggggcaggaggtactggatactttacattaggcgtgttttgttagtaaatgcaagtactagtacctcaaacctggggagacggccagatgttcagccaataaaaagcacggacccacgcaggactagtcttcttccggtatagcgtctttttctactccgggcaggtgcgatggtttcatcgcgttttcgcgctttttctcaccggcgcctttccttcgccttcgacgttgggatgtttgaaacctgccttgatagtcccgtgatattatttcattctttatgactactagagtcaagtgactttgaatatgcaagtaaccctcacctgatctctaaactacaacactgcaacatgactggatacaactacggagtatacatcagcctaccaggtccaaactcatgcacggtcatgcctccgtcttctcaccgtctacccactgttctccgaggagaggccaaaccccaattcgcaaggaaagccgggacacggaatgattgagaagtatacacaagcatgtaggcccgacgctacatccgttggtccatatttccgtgtcctctccagtcactggcgcggtcagataatatcaattacggagtatgcacttggacgttcggagcatgcttggcggggactagagaaccccgatgttagccttacctcggtacggagtacggagtgcatatagtgctattccagttccggtgagccatgagcgatctgacatatacctcattctattatcgccatggtagtgcttgagttgtgcccaaccttggaggcatccatggatgtactccggagcgcgacagtccggaagctagtatagactttctgcatagtagaatttacgcagcaattatttcaaccaatagacatggccacatttacaccaggaaccaggtagcaccactgtggtatatacatcgcacgaacccgggtccacctcttttatacaatcatcatgattggccagactcaaattccaaccctgctaattccacaacggcttcccttcacattcgacccgaccaaaaataaaacatcgcagcataacgcctgatcaatcaaaagcaatctaaccagcacgacccagcagatctcgggcgaaatcgccattggcacagcccgcacccgaaacgtctctagtacaaccccggagactggtcactgagtacgacctagccatatttgcattcaaatatacttggcaataaagtccagccaaaagaaagccaagcatggggtcgtcctcggatactttcccgaccctggagtcccttcatttcccgtcggcgcagctgtcaatctcccagacgctttcgtcgctgcgtcgatcggcgctgtccgtcgccaaccggctcgagtccatcgagaccgatgccgcctttgcgcaggacgtcgcggaccaatatggcttaccgctcgttgcgaatgagcgctgcggaagctggtatatcccgccgacggccaaggctggcagtgcttattttaaaagcaccgatggccataccggtcagtgggattttagctttcgtaggctgaacttgcagttgcttccgttggctagggatcatggggggtaagtctaacttattttgcactgtcgtcttttgcttgtggatttacatatgtgttggagtgccttttgacccaagtataaactatgggaacaactccatcactacacgatcatcctaagacatgaaaagaacgagaaaaaactgactgtatttcctttccgctgcagctgtgtaattgtggactcaactcgccgagggaaatgtgtgtaccacctctacctttcccttcccttacccatctagtcaccatgcatatcatgactacaaccaaggctcggtccccattaacccacccctagtaatgccagacgcactatcaaaaaccgtcccaatctggagcgccgtgctaaacagagccctattcccatccgcaaccgcataccacccagtccgccttccaccagattacctaggcgcatcagaagaagcacagatcgagaaccgaatcgacggattcgtgcattccctcaaggtacgcatgtgccattaacaatgactcccgcatacaacatacccttacaccgcacgcccctttctcatccatagctgatatttaactccagaacctgaaactcgatctagataatctacgccagcaactcggaaaaccaatccagatcgcctgggccaacaggacgtatttccacccgccggacctgcacacgagcgatgagtacaatctactcgtactgtgctccgcttcgaggcgcgtgcttggcgctgagatgtccgagggcggatacatccaaggcgcgggcgatgatagcgaggcgtgggcgtatgggctgacgccgccggtgttctgggccaaccaggctattttgaagagtacacctgaagacgaattgccagagcttattgaccggctggtggcggagcataagctgctggatgtggtgcaggatgcgacgctagtttcgcctacgcgcaatttgtatattggatctggggccggggtggatgttgggggtcggtatgatattgttattgattgtaatgggagtgctgcggctgtggagggtaatgcgaaacggttgaatttgggctgtgattctgggaaattggggagtcgggatctacggaaatgtctggataaggtgcgtgagtttattggcgctcgtcttggggaggatccgtcgctgtcggtgctggttacctgtgagagtgggaaggacctttcggctgggacgcttctggcgatcatttgtctcttttataacgatgagggtatgtatgcaatgccccagatggtctgggtgatgaattcaaacgctatgtggaagaaaaataactaatgttttcacaggcggcttcgatgcctcactgagcaagcgcgcgatcagcaagcagttcattcgacagcgtctagcctggctcgtgtcgtcgaagcatgacgtgaacccctctcgcgccacgcttcaatctgtcaatgctttcctgatgcagccgccggattattgacctcgagcaatgtgattacattgcgtcgcttggtcggatgattggtttcgaagcgggtcattaagaccatgccccagcgatcgctcattcgttgtccacggcctccacgatggcgccggcactgccctggtcgaaggaatccagcacacccatatcctccacgctgatgtcgaagtcgaacacatccgcattggacacgattcgttcggggttgtcggtcttgggcagaggcacccatcccttctgcatcgcatagcggatcaagacctgctgagtggacttgccgtatttctttgccacttcgactagcgtggggtcgttggctttatagtttcgcaccaggggcgaatatgcctcgaggataatgccgttcttctggcagtattcgccgatgacgcgctgctggcaccacgggtgaagctgcaagaatagaatagtcagtgacccgatcaaaccgagaactatctacgtagatagaaaagtaatagaagcagagcacgaacctcgagctgatcaacgtgaggcgggaacacttgggcatatgagcgcatctcctcgatgtgccccacaccgaagttgctaacaccgatactcttcgtcttgcccgccgcgtacagcttctcaagcgcctgccacaagacctttcgcccagcagagcccgagctggaggagtgaattaagaacaaatcgacatatccgtcggcgccgccgatcttgtgcacagaagccagcaatttatcgtaagtagcctcgaccgaggctgcggggctgaggatcttggtcgtgacgaagatctggtctctggggacgctagtggtgcgaagtgcctcgccgacttcggcctcgttggcgtaaaactgtgctgtgtcgatgtgtcggtagcctgcttccaatgccttcaggcaggactgcacacactggtttggcggggagcggtagacgccgaaaccgaggcgcgggatgccgacgctcgacttcgggagggggagaagatcagtgatcttgaaggaggcggacatcttggagatagtcagggatattgttgtttgcgaaagaaaattagttgagagtgagtatttcaagagaatcatctcctggccccgctttgcgaaaatgaggtcattccggatgactaaacgagtaaactcaaaatacgacaataactatgatagggtatgcgcaatattaagtccaattgaattccaatctacttggctatcctgagaatctctaatatatctgttcactcatattcactgtcaatagcctagtaatgtaaacacttgtgcctgcattgtacctggccaaagaattgcgtgatactatttgaccttacgcttgtttttatacagctattgcgccatcgaggaacattgcggggctgccgaacaatttagagtgttttgataagaatcagtactctcggtgtctttgtcagttctagtagatccgtctacttggttggcttctctaaccgccagtgcgttgtagttatgggattttgcctacaggatggttgtaatatatatcacaccaattcaaaggctattattgtacataggaatatcctcttgtgattttgccaccttcctttccgttttaagaactactatagataggaaggcataacctaaccgaggaaacaaaatataaacacctcctccctcttcctatgtacacataagataacaattctccgctcatgaacaatacccctagatctggtttcaagctcatatagcaaatatcagtgttcatacaggaaattatgactacgttccgctagatgcctgaatattcgagcccaacccccactgcgggctaggcggtattgagccggtgacaagccaatttaacaagcttatggcagacgggaaaaatccttatgttgtcttgttaatgccccatattcggtgctattcggtgaattctgtcatatatcatgccctctgcttccatggtttcatcttacactaagtcacatatattccccccaaagtaccgacacaaatgactccttgcagctgagacccggtaaatgaacctctgcaaagactccgtgttggtagtatgagaatgcggtactggcaagattagcagcgttctgtgagctgatatgagccactttaccatggtaatattctgggcacaatgatcttctattatcatggcttttgggtttgtacagacaaagaactagagcaatccatgagtggaacacatgtgttatgacagatagacccactcgctctctttaaggtatggcccaaaattgccgaaataaccaatgagtaaacgctggaaataccaatctgaattcggagatccttctatataacgaaccgcatcccgaaaatcaccgagcctcatgcgacgacggccacgggcatagtccatatcagggcttgatagcttgaatgtggagaaaataaaaaggaagtcaagttcgagagtggtgggagagctcataatatgtcctagaactaggaagctatatgactacacatggtggcgagcgaggattataccagtagccctcctctcgctgatatcagaagaaacaaacatcatgcctcacaccaaagaaaccggaaataagagatgccattcctattcttctcatcacgttacccatttcattaagtgagccctcgtcgttgtttgtcttatttgtgaatatgtagtggcacaaaccgaccgcccttaggatagctataagaaggcagccctgcccccagaccttcctcttcttttcttcttcttcagctctctttgcctctggcttagatttggtgtagtatctgttctggtcagtttaatcgctgatagtcctgcattgcaggtcatttctgattattctaatatttggacttcgcgacttggtctctgtgcttgcgcatgcctcgttgcactgtgtcattgggcttacactacccccgatcgacgcgaactccttttcatcaactgttcggcttgtctgggcgcttggagaagatttttgcttgggctctatgttcttatcagtggttgctttgtttacattgttgattaacataggtcaataatacttatggagttcctattacatatgtctattagctctgtctttgtcgtaacttactctcatctcagaactggggttgggggaaaagtaaccgtttttatatgagtgccttccttagtagaaaaccatccttgggccttccactttaagagtatattaagcttcatatgagcttcatgtgagcttgaagtgagcctggagttgtttccacgccgagatctttctgttaagttacagtaagacagtttcatttgcggggaagttgtggggaaagctgtgggcgaagttctgggggaagctttaaggatagacacgggatctctctccatagacttggctaagcctcaatgagtccatggtctttatatcctgcgccccacgctggagggtcacgcgtagtacctacgagggcctgtgatattaatctcgtatcgtaaccaactattttcttctcggtctctgcaaccttgaccccgcactctcgctcaggacatatccgaaagtgtatccggcttcggcgattctacggcatgccctggctatagggcatagagtaagatgatattgccgacagtagagctatataaaagccgcagctaatagaactcttccctattaggttggcgaaggcatttgttcactaactaatcgacaatatggcacagcgattctggagttttcgtggctctaaattggttctggcaatttggattgaagcatgcttcggggtcatgacctttggctacaacatgggagctgctggcgccgtcctcagcaacgcttccttcaacgatcaattccctcggatcaatacggtgactactactggcaccgaaagacaaaagaattctacaattcaaggcaagtcaccgttgatatgaagtaatggatattccctaacaatcacgcatttcaataggcactgtcgttgctatgtacgcgctctttggaatgttcggctcagtagcctgtatcttccttggtgacctcttgggccgccgtaaaaccattttcattgccggcatagtcaacgggattggcaccatcattcaatccactgccttttctctaggccaattgatcgtgggccgcatcatacttggattaggaactggcggaatcatagctacggtttcactttggcaatcagaagtttcgaaagccgagaatcgcggtagccatgtctccgcgtttggtgtcttcactggatctggcctttcgctttcgctgtggacgggcttagggatgtcgttcacgcagcccaattcagtgtcgtggcgcttcgtcctagtgctaagccttttattctcgagcttgctcagtctcttcatctttgcattaccagaaagtcctcgctggctatgcaaaaagggcaagtgggaagaggctcgggaaatcttgaatcttttgcataatgaggatcccgacttcgaggaaactaccaaacagcccgggggaacaaccagnnnnnnnnnnnnnnnnnnnnnnnnnnnnnnnnnnnnnnnnnnnnnnnnnnnnnnnnnnnnnnnnnnnnnnnnnnnnnnnnnnnnnnnnnnnnnnnnnnnnnnnnnnnnnnnnnnnnnnnnnnnnnnnnnnnnnnnnnnnnnnnnnnnnnnnnnnnnnnngaggatatccggatatcgctcgagcgggctggaaatgccagtatctttacaatgttcaaaatggggccacaacggagccttcatcgggtcatcctcgctgccattcctcaaatgtttctacaaatgagcggcatcaacgttattgcccaatatactcctgtcgtcttcgagcagtttttaggctttgacgcatttgattctggggtcctggctgcagcttcccagttcgcagttatcctcggtgccatctgctgctcctggacagtcgatcgagtcggccggcggaaactcatgctgatcagtgcgactatgatgtccatatgcttcgcctgtctatctggtctattggctcatccagaaaaccgtaccgggatcaaggcagctgccttttttatatatttctatttattcgtctatgtccttgggttcctcgggattccattcctctacgcaagtgaggtcgcggtgactcagttccgagcaccaacaactgggctgtctactgctgtatcctggctattcaacttcattgtcgccgaagtgacaccagtgggattcgccaatattggctggaaatatttcctggtgtactgttgtatcaatgcgctatgcgtgccgacgatctatttcttcttccccgaaacagctggacgttcactagaggaaattgatgagattttcctagcgtcaaattcaatatttgacaccgttaatgtggcaaaaggattaccgaagcacgaacatcgtgagttatatgcggaggaagaaggcaaagaatcttccagtcaagttgctcatattgacgatatgggaagaagagatgaagttgcataactgaatatgcggctttcttgtgttctgactcacaatgattcaattatagtacttgaaatacatgctcttttataggcaaagcgtaggaagcatcccatttcagttagtactcgacaaatgcaaggagctcgtaaccgatgtgacctagacattctgaacaaaaatagagaactaatgtctggcaacatgaaatagaggattgcccctctttagcccgatattcgaaaccgacctacgcgacaattgctttcattttgtgtgaagggaatgcgaatagctgggtaaggggtgttatcagtcgcaatctatgcacgaacatgtacatatcaaagcgcctactgggcatatcagtgcccggcggcggtaaaatagacatctgaaacgtgatatgaagagtaggccaattaaaacttcacatatccagaagtaccaatccattctaataatattcatgtacaaatctcccgattcaagacacaggggttgtaaacaatgaggatctatacttagaagtggatccacaaggaatgcatctgcaaattgtcacttgacaattttctcaacttcaagtttcaacaatttttttttcttcctttcaagcgctagttcgataaacacatttcttttctttcgcgttcaaatcaacaagaaacacggttgctcgggtgattttcagctccgacttgtgggacaaacacaacgacacccccacccctcgacattatttcaacaccccccctttgtgctccagtccaaatcggaaaccgagtctttcagcctctctgatcatcccagtcttttcttctcagccctagaccctgttcgctgtcacctcccgacatcattgccaatcggccctggatgtctcccgtgatcgaagatgttgacggttgagaagcagtggattaatgtgcagcaaaagaccttcactaaatggtacattctccactccgttgctctctggatgaacttcaactgacgagcaataggttgaatgacaagctaaagacccggcgcctgtccatcgaggacttggtcactgatctttccgatggcgtatgtcccgcctctcccccgctcactaatgtcgagttgctgatcgcatattaggtcattcttattcacctcctcgaaatccttggaggtgagtccctcggtcgatatgcctcgaaacccaaactgcgcgtgcaacgcttcgaaaatgtgaacaaaagtctcgatttcatcaaggggaggaggattcagatgacgaatattggagcagaggatatcgtcgatggcaatcaaaagattatcttgggtttgatctggactctgattttgcgctttaccatcagtgatatcaacgaggagggcatgaccgctaaggagggattgctactctggtgtcaacgaaagacggcatgctacgacgatatagaggtccgagacttctcaaccagttggaacaacggcctagccttctgcgcgctcctcgatatccaccgaccagacttgattgactacgactcattagacaagagtgatcaccgtggaaatatgaagctggcctttgagatcgcaaccaacgaaatcggtattccggacctgcttgatgtggacgatgtatgcgacgtacccagacctgacgatcgctccctcatgacatatatcgcctactggttccacgctttttcgcaattggagagagtcgagaatgctgggcgacgagtggagaagtttgtcaataacatgcatggcgcatgggacatgcagaactcatatgagcgccgagtgaaggaattattgcgactgatccgtgcccagcgcgatcactggaagaccgcctcattcgcgggaacatacaaagatgccaaagaacaatcatatcagttctcgctctacaaacggaacgagaaacgccaatgggtagctgagaaatccgacctagctgctctactgggaaatatcaaaaccaagttgggtacatatcgactgcggccgtatgacccaccacaagaactgagtccagaaaattgcgacaaagagtgggagatcctaacccgggaggagcatgaacgcagtcaacttataaacgaaacaatccgtgacattaagaacaagctacgccgctcctttgccgacaaggcaaatgactttgcattgaccctgaagaccttatcattggccatctccggactagatggtgatgtcgaggaccagcttgatcatgttaaaaagctaaatggcaacttgccgcccctggacgcctttctcgatgctattgcagaattggaccaacagtgcgcggaggccaatattgaagaaaacgacttcaccacatacaccctggacgagcttgcgtatgaattgagtcttgtcaaatccagcatttcaaagaagctgtctttccttgacaaccagatagttgctcgcaatatgacgaatctgacacctatccaattggaagagtttgaatcggtattccgccatttcgatcgcgactcttccaatacactccatgagctggagttctccgcagcactggccagtctgggactggtctatgacgaggacgagatgcaccaggtcttcgtggaggtctgtggagcccatcgactgtcacagaatgccggagtcagcttcgagcagtttattcgctttatggtcagcgtgacagaggatcagaataccgccgaacaggtcttccagagtttcagggaagttgccgatggcaaggtaagtgaagcgtttcttttaatctgacaaatcattgggcgacagtcacttacttctattacagccctatgtcacagagctggacctccgacactctctcattccagatgaagttattgagcatttggttaagacgatgcccgcacacgatggccccgatctactcgaggaccgggagttggccaagtacgactacattagcttcatggagaaaatgcgagaagtgaacaggaataatgagagtgagagtgagcaataaaggtatcattgaggttgatatttgcgcagcattactggtggttatgggggatttgcactgacttgttgctgctgtgtttctggtgttttcagcgacgattctcatgttttgaacttctttctggttcgtcttgcattctggggttcggtggttgttcctctttagcatgtatgtatgtattgtgttgatgtatgccttgctgtttgtaatgatcaggataccatgtgaacattttcaattatcagaccatcggtagacgtgggcaagcgaggatggccaagagactctaatatgacattgaatcaccaattcttcaccccaatcgaatctttgaagctattctagtccgatctatagatgtatgaggtggatcattaccgtattagtaaaggatatatcatgtgacagcccccagatcatcgcagctgatgatgagtctgcgactaattgtaacccttgacacgtcccactcctttcgatctttttcactcaaacgctggtcataggtgaatttcttgatcgagcgctctctcacgcatattatctcctccctcaatcccatccctcaaccataaattccaagatggaccgcagcttggacgaaatcatcgctgaagacacggtaaggctccagcgactaatgaaaccaccaaaacgtgcaacttactcattcaattgcagcggaaccctggtcgtacttcaggcggtggtggtggttctcgtcgtcacaataactccggccgtcgtcacgagcgcgatggcgtcagaaaggtacagcttgactagaaaccgaggctttcttctggagtcccatttgcatagcatcgaagctaacatcacactcggtgtccaggtccgccctccttttcctcctctgcgaattctctccttgctccgtgacaatcgtagccagtcccctggatcgttggagactcgccaacgaccacgccacggcaaagacatggaaaagaactttgcacgatatctcatctgacttggagctaacgctaagttccttcgataataacagccatacacttcagaccgtgtcgatcttaacctgtgattatacctcctatctactacggtgtgggtgatactgacgggtttctggttatagagactgggtgcacgacaaatttgacgacgaccgatgtatgtggctttcccgtactttgctgggacctatctaacagcattcctctccagcccgcccgtcccgtggaggccgcagaggccgcgatggacatgattccgatcggtaggcgcctccttcagccttaaattttaagcttgtctgacagcgctaattgaattcttagccctagctcactgaccaaggttcgcgtggataatctccactacgacattactgaaagcgatcttgaagtacgtttcaatcatactcaaaccatcacagaataacaccctaacaaaccccctcgctgaacaggatctcttcggccgaattggacccgtctctgaacttactgtctcttacgaccgcgctggacgctccgagggagttgctttcgtcacatatgcccgcctgaaggatgcacacctctccattcaggagtacgacggagccaacgctaagggccagcccattcgtctttctctcgtccccggccgccgtgaacgtaaccccctcgagtccgcacagcgccctaggtccagccttttggaccgcgtagagcgcccccgcgacgaccgtagcatgagccccgaggacagcgaccgacgccgccgtggcggtcgtgctcatcgcagcgacgtcactaagcccgccccagacaacatcgaccgttacgttcccgggcaacgctccagccagcgctctcccaaccgccgcggcggaggcagacgtggtggtggccgcgacaaccgttcccaacagactgaaggatccaaccgccgatccaatgcccgtccgcgcaagactcaggaggagttggaccaggagatggaagattactggggtagtgccaacaacggcggtggtgaagctgctgcacccgctcaggacgcccctcagcagactgctccggcccctagcgcacccgctgccgacgatgatatcgatatgattgagtaatacctcacggtcactcgaactacaataaactcgcttgtctttcgcatttaagattttgggacctctatccttgcttttggacttttctatgaattcggaccaccttggcctttttccaactcttctcttctctctttccatcgctgaggcttttcagcatgagggctgaaactctgtactttacctcaaccaccaaattgtaactcggtctatttcacacattcggctttctactgctttggtttactcttgatgaaccattatccttgcccttcctctcgttgcatccacactggcgaactgggagctcattatatagttttttggggtttttttttgcattgttcggtgtcttcgttcttgtctttatatagtctagtcgtgggtaaaacccgactcgtgtacgtcaaaagtctgcatataaagagcaggaggctgttcgcaatcaatggatgatgccaagatacaattcgatagagcataaatccaatcaaggccgccgccaattataaagagaacaaagaccgcaaacgataaaaacagaagatatggtattcttccgtaaagtcttctacattgtaacaattatgagaagcaagttcacttccacagcccatagggttcgcggcatgctttccataacttgatagtaccgtcttcactgccagtgccgtagagcttgccatcaggggagaagctgacagaccagataggaccatggtgacccttttgaacctctgcaaaaaaagttagctcggatttaacaagcataggaagcaaaacatacccagctcctcatccgtgttcaaatcataaactcttgcccaggtatcattcgcactgcccgtcaccagacgaccagactcgctattaacggcagcactagcaacatcatagtcataatccgcctttttcagcaaccgaccaggctgcacgccatcaaagagatagacactcttcccagcagcgacagtcaaaatccccgcatcattaggtctcgtcgccagactattcagctcgcaagagccaatcgtgccatcaaccgcatactcaacgatcgggtcacgcgagcgcagatcccaccagcggatcttgcggtcttccgccgcagtagtgatgacattgtagtcctggttccagacgatagacttgatcgtcccgccgtgcacgccggcgccgatctcgtagctcgccacgccattctcggtggccggagaggccgaggatgggggaggcggtgttgagcccgtgctggaactgccgccccgcgttagatcgaagattcgtagcttcttctctgcgccgcctgtcgcgagcacttgcgggttcgcttggattgggaatgctactgcacgcacgatgtgtgcgtgttgcagtgtgtgtaggcattcgcctgtgtaggtgtcccagaccttactgttttgggggttggggttagtttattggtgtgggaggtgggttggggggattttgcttacgctgagaaatcggcggctgctgttgctgagatggcggcgtcggcggagagccttgcttgccatacggcacctttgtggccgaggaatgttccaatcctgggtttgatgttagtgggtgcttcacgggtttggtttcatttgccgtaccagtctcccgttatgccatcgcggagcatggggttattatctttagtcggttagtgactatccggtaactggtgagaatcattgctttttcttacctttgcatgaagagataaagtaatattgctcgtcttcgacggtggaagagaagctcagatgcgtcaccggacgagaatgcccgtggcaagtcagagggactaccttggggatatctgttgaagacctatcagtaaacatatcaagacggtgattttctattccattctacacaaatcactcaccggcagtcattttgtcggtgttgaaggaagttccgaggtttcagtgattttgatgttaggtattagaaagacaatcagatcagcaaagtgctatgtgcccaaccgagagcccacgagttgatatcaagatgaaaatctaggaagcagaccgagagagagttcaatatgtctaaggaaggtacataagaaattcgtcagtgtcgtcaagtcatcaaacagatatgtggggttcgaggaagagccgatgacaaaggatcgaaagtggattggacaagaatttttccaaccagacacctgaaaaggagagaaggcctctgggaatacgaaactcctttggggtgtagatgggatatcgaatttcaatttcaaacaataacgggcagccctggagatcacctattaggtaaggcatgcgctaatctaattcgggtagaatctaggcacgtgatatgctattgtatatggtcgcgacagttgacggcaagttattctaattagacattgacagacatctaaaaggagacaggaaaaaatgtagcaaagcatctaaaagatacttgaaaagatacttgaaaagattactctacataacaatgacagtgaatgagaggccagaaaaggccgcctttctctccactttaacttttaagcaaggactgttcaatggagaaacagtgcagttggttcaaatacctagatagatagaaagagaagaagcaagcaagcatgtgtcaacgatatgtaaagtcatatgacagccaatcatgcagatcgtggcaaggaaaagaaaagaacaaggtaagcacaattggcccagcagaaatccataggaagttaatgatccatgaagtcacatggtagacagtcatgctgattgcgacaagtatgtctgcaaaggcaggagtcggaagaattactcaacagagcgatctaggtcttcatcgctcaaatacccacgccgaagccttgtgggcgacatggattggctcgctctggggggcttgttttcgccggccattctgacaggcgaaagtgagagagtcggcggcttgttttcgcccaattttctgacgggagggggagagcgagtcggcgcgctaggaagcctggattcgcacaactttcttgccggtgcgggagaaagagttggcacactgggaggcttactttgaggcgagtctgtttcgggcgagggagatggacgggataaccggatgggtattctccgttggaaactcggtgctacttcgaccggagctcacgatcccgaagggacacaaactgaatcatcatcggagtcaatctcactctcgtcatcctcggcggctccgcgcatcgctgcaatccgatgtagaatccactgcaactccaacaactccatcgacggtagcggtttactcttaggatcatcggtctccaaggtgaaaatatgccccgaccgtatgagagatctcatctcaccgtgaataaggcaaatattttcgcctgggctttccgtaaagctgttgatatcatgggggaacgggtgccgcatcgtctcgatactgtcagaagctttcttcgtgattttcccaggagcagggagccagtggaaggcaacttccatcgatgtcttcttcgtgttaattgagataggacgaagagcataaagagtattatcccagtaggtatggactagggccataaaggtgatgaggttctgcactcgctcagtatccactttgccatcattatcatcgatagtcattatttccgctttccacttcatcactctgtccacgccccagaatccttctaagatggaccattctatttctcgagagctattgttcagcttgaatgggaggatatgggatacatgcagcccatgtataccaaacttggtaagaacacatgcattcccatcgcgagtcaaggcctaaagattcgaagttagcattatatctgatatatccttttttccgcttaacatacggcatccctaactgctttaccacgtggcaaaactccacgtgtagcttgttccgacgaacccattggttcctcactagacatactcgcaggcgggccctttaggcgcttcccaggagacgaggattcgtctacgggcacatcgtcggcctcgcgcttttgcccctttgctggtttctctggtttctctggtttaggctgtttcctgcccgcccctattactaatcgaatggccagtttagtattgtagaagtcgtcttcgatgtatttatactgcccaggcacgtcaatgtaatggggcaaaaattgagtctttatagctgtcttcatatccttatcaggattttctgtcgcaaactatctgagtctatcgatatcgctaaaccataacatgaagaacatatggcgagtcattcggcgcaggaaagggtagagacgtatcatcgtctcgactaggcttcggcgttcaggatcttgaaattcatcaaaaatagtgactgtatcatattttggctcagttggttgatccatgatggacaaaaaaaaagattctaagatgatggcaacgatatacttgatactgttgcgtggttggcggaaaggaagaaaatagtgggactgttacatctccgccaccagatcggtaaggcggtactggaagtccaacaacaacaacgggaagcaagcaggcaggcaggcaagtaaggcgtcagctagataattaagatggggagaaggaaagaagaagcaagtgcaaagtggaaggcagccagttgatatagctgatcaatttgcaaacgttgcaaaaaatctaatagtaagcgagcaagcaaacgagcaagcaagcaaacgagcaagcaagcaaacatgaagcatatgatgaaggtttagtagatcttgacacaagcaggcaagcaaacaccaaacaatcgtgctctccaacaccaaataagcatgtactagtaatcccgacagcctaaggcctccgggatagtcgttacagagcgaagcgactggttctaacctctaaggttacgtaaggtctccctcttgagggctgacctctcgatatcggcgcctaaggcgtattagagcgtgaagggatatagaatatatcgtctagccggattagaggtagccagaaacggccagctttcacgccttccaagcaagtagtattaataccgtctgcatctttgcatctgctactatctgctgtttgtttcattgaattgtttgctagatagctagatagctaagcaagatgctcgagctttacaattgcgtcttctttctttcatcatttttcttatttagtttagggtgttgatatgaccaccccccccccccccccccccccccccccccccccccccccccccccnnnnnnnnnnnnnnnnnnnnnnnnnnnnnnnnttttttttttaagtttggggttttgtataaccccccccccccccccccacccttggctctgactattgaatgataatgttgagatatatcaggctgtcagattggatagttaaaaacagtcccaaaaaatgctatggataacagtagccgcaactgtagtcagtggtattcagtaagtatttgacacctattccattttccacggcctaggaactttaagtcttacttcaaatgttacttctctttcaggttcaggaaggggatacgtgtgcccaagtatctctggctcagtctatgtctcttacagatttgtatttcctcgatcttgacgatgcatattgcgtcaaggccgttggttcaatcactagctacccaacttacacggtgactggttatctgttggcatatgattgaagtgacaggagtattttgtatgagacaataaagttgaattctcctaatgagcgaagaataaaaattgtgagtcttgtaaccgagttgactaatgtagacaccaaatgccaagactcggaatgtagccgaaccgtggaacctgcaattgctccgctccttaaatccacttcgcttcccgaccccgactaactcagacaggtacaagtgttttagcctggaaacctgccgattcgtgaaactagagcgtttgagagaacaattttatctctaccttcaaaccctgcatctgtggaacctgtttacccgtggaccgtggtccgtacccaactccctaacataccgagctttctgtttttcttccctgtcacttcataacaagagcctgggacccttcatcccaaaagttaacagatccatgattaccagaagagctcttgaacttcatgttttcctcgcatctacagccaatacgccctttattcccgcccgggtatccctgggttctctactctcatcaataacacttcacgtacttcacgtctcgctaagtcatcgccactgtatctcagtaacacaactaccttttcaagaacagtgtttactccttcgaaacgtgatcccaaaatgaaatccgattcgaatgaggccgataggcttgaggcgattcttaaaaaagataacttcacgatatagggctttgtgatttaccactgcacgtaccaagatgatgccgagtgggagaaatttatgaaccgcttcccaagcgcagttctagagtacctagagttctatagtggtcttaatctcctcaatacatttgccccgacggtcttccaagacccctcgttcaaggctgcgacggtagtcactctccgcgagcactttaacaagtgggcaaagactataaggaaagaggaacagggtgttagtgaagactatacccgtacagggcgctatcgatgactggcagtcgtattatatgcgatcgcctggggttgcagctatttcttgatctctagtctcgaagtcttgctggagatggggattgttctgcatctttaagtccccgtagctccttgtatatttccgatataactcatacatctgaatgaaaactacaattcatgaaaagggccaccggccccgaggtacatattttaactctttttttaagatcgacctaacatctcacaagtatgacgtgttagtcaatctcattcgcatcatcctcggctccgtgcatccctgcaatgcgatgtagaatccactgtaactctaataactccatcgatggtagtggatgctccgctgcaccaacaaatttggtgcagtgaaggggagcgacgtatcatcaactcgaccatgcttcggcgttccggatcgttaaattcatcaaaaatagtgactgtgtcatactttggctcatttggctcagttgggttggccatgatggacaaaacaacagcttctaagatgatggcaatgatatagatacagttgcgtggttggcggaaagaaaaaaatagtggcggagatgcgacacctgatcagaaaggcggtcctgaaatgcatgcaggggggtaaggatgagaggcccaagtgcgtcagctttccttgtcactactttcacaatggtttagatttaggtatccgagagatgcatatgcaggtaagatacatcagggaaaatgctcaatccctttagagcaggaccaaaaaaacaatctaatgtgttgatttctatggggcgagacgggatatcttcgagtcttgacttctcaccgtcctttcactgtagttaatcaagttgaaatgtttgtttgttgttccataacgaggaaaggaatcaaattggggtttgtgaatcttctatgttgatgtgatccttagattggctaactggaggagagatggctgtccactatgttgtagatgattccaagcttgcccgaggattcactagttagtatgatagacgaatgagtcacttgaggaccacctgagcatgtccttgcctagggctagtacttgataagtaagacctcgtgttctagcaggttccccgaatggcgttaccgcccacgtgatatgaccattgatgcttcggcggggcgatcccccggaacgactaaaggacaacaacatccaggggagcttgattgatcgttaagtctgcggtgatacccttgaattatttcttctttggattcctctttcttcacgatttcttccctcaaagttttatgtatgcctgacttcaagctctccgcaactttggagggccacggcgatgatgtaaggctcctggtccaggcgtctgtaccgacgccattgaccgcaccaaaccagacagactactcacattattttggcctaatctaggttcgcgctgtggtcttcccaaatccaaatgtcgtcctttcggcctctcgtgatgcaacagttcggctctggaagctcgtctccacttcacctcccgcatacgactataccatcgctgcacatggcggcgctttcatcaacagcttagcctacattccccccacacccgagttcccagagggccttgtactttcggctggacaagatgcaataattgaagccaggcagcctagtaagagtgcagaagataatgcagatgctatgctcctaggtcacggccacaatgtctgttctctagatgtgtctccggatggcaaatgggttgttagcggcagctgggattccacggcccgtctatggaaggtcggcaaatgggagtgtgatgtcgtactggaggggcatgaggcaagcgtctgggccgtgctggcctatgacgagaacacaataatcacgggtatgctagcttcatgtcgccctaacaaatccgacaatgctaacatcaccgcaggctgcgctgacaaaatgattcggatgtttaatacctcgggaaccctactcggaagcgtacagaactccaacgatgtcgtccgagccttgtgcaagcttcctgcctcgaaccctacaggggctcactttgcctcggccagcaatgatggaatcattcgtctttacacactgcagggtcaacttgtcgcctccctgcatggtcatgaaagctttatctactcccttgctgcgctcccgtctggcgagctggtgagctctagtgaagatcgcaccgtgaagatttggaacgggacccaatgtgtgcagacaataacacatcccgcaatctcggtgtggagtgtcgcagcttgcagtgagaccggtgatatcgtcactggtgctagtgaccgcattgctcgtgttttcagcagaagccctgaccgtcatgcagccccggaggccatacatcagtttgaccaggccgtcaaggagtcggctatcccagagcagcaagtgggtaagattaataaagaggagctacctggtccggaatttttgaaagaaaagtccggaaccaaggaaggccaggtccagatgatccgagagcctggtggtaccgtgagcgcccacacctggtcatcagcaacacaggaatggattgccatcggtatggtagtggactcggctggaagcagtggtcgaaagaccgaatatcatggtcaggattacgactacgtcttcgatgttgacatagaggatggaaagcctccgctgaaactaccatacaatgcctcgcagaatccatatgaggctgccaccaagtttattggagacaatgaactccctatgacctatctggaccaggttgccaactttatcactcagaatacccaaggtgccactattgggcagtctcaggaacccgcaggctctgatccttggggctcagaccgacgttaccgtcctggagacgccgcagcggctgaagagtctcggccacctgcccccgagtcgcgccctaaggtgctccctcagaagatttatctctccatccgctcggcaaatcttaaagttatcacgaagaagcttcaggaattgaacgcgcaactcgtgtctgatggatcaaaggacgtggctttgagcccctcggaggtggaaacggttgtctccttgtgcggccagctcgaatcttccaaacaactccaactttcacccgaggttgaatctggagtgccattgatcctgaagatcgttacaacctggcctgccgccaatcgactccccggcctagatattcttcgtctactcgcggcggctgcgccatttacagcatccgccgagtacaaagacgaaaatgtcgtgtcgggtgtgatatccagcggtgtttttgaacctcctcttaatgtcaacaatgcaatgctcgcaatgcgaacatttgctaacctattcgagacgactgccggccgtgatctcgccatgagctcatttgatcagatcctggcaggagtgaaaactgctttggctagcagcggacaatcaccgaaccgcaacctcacaatcgccatcacaacactctacatcaactttgcagtttatcttacctccgaaggtagagaccaatctccagaatccgcagaacgaggtctggtcctcctagaggaactaactcagatcatttctggagagaaggactcagaggcggtttaccgagcactagtcgcgctcggcacactggtgacagcgcttggagaggaggttaggagcgctgctacagaagtctacgaggttaaaggtattcttgcgagagcctcggcctctggtcctggaaaggagccgcgcatcaagggcattattagcgagatccgggaggctctctaagagtgcgtgctattttttttattcggtatgcgcagattagagatgcattccttcctaacgacgacaacgcgattcccaacaaaggcaattcatatcctcattttccacttcacgtagatacatcatagatgtttccttatttttgaatcaactagcattctgaatcattcattctaaatcattcactactcccttacaatctgccctccgcatcaaccccaatctccaaaacctgatcaacgccctgatacttgggcaaatcaagcccatacttatcagtaatgttcttcgtcaaaaacctaccaccgataaaatgcctgccgtgataaaatgccacgcacggcttaggtgcagacaaactgatcaacgcatgcggcatgaacttcgcaccgggtccttccttcggtggtccggtctggatatcccacgagctgggcgcatcgacactcagcaccgggacattggcggactcgatttgcgagacgattttgtcgaatggatcacgcaatggtccgccgaaggagaagccgaagatggcgtcgaccaggaagtctgccgtcttcagggctgcttcaaagtcgtcaacgaaggggactgagaggttatgcagttgggttttgaggcgctggcttgggtcagattttcttctttttttttttgcttctacgatccttctggtttgggattgcgtacttcataaagctcctttttgccctgctttgggtagtacagcgacggggtgtagccgaattgggctaggtggcgagttgctacgagaccatccccgcctggtggtttgttaggttgctgttgctcgaatggcaaggttggagatacttctcaccattgttgcctggtccgcagacgactagaactttcttgcctgcgcttggggggtggaccctccagactagttgcttgtatcagtatggcctgactacatgctcgagattgatggttctgaccggcttccgcgacagagaggcctgctagctccatcaactggtccagagaccagccgccgacctccatgaggtctttgtcaagtgacgcggcatctttggctgagattgcctaggaacatggttaggttttgagatggagctaatatcagacaactataccttcaacgacattattgctggtttactgtagcgacgaatggagggaggtagacggatacgggcgaatgtagaccggatcatgtaagtactttagatatagtctttcgactaaatgagcaattgacagaaaatgtgtaaatcaaaatgacagccagctctgagtagatctactgagggtcctcacgtcattacatcatacatcatatgggcgctaatccatatttggctccatcggatcaacaataattccggcctagaacttttgcggagggcagacgggatcatcaaaagaacagtcttgcgctctcccaattgaaacagcataacgcacccgccaagatggttctccggattcgactcgcccgctttggcaacaagcacaaccctttcttcaacatcgtcgttgcgcaagctcggtacgtggtctttcccccgtgaatggatacccccgatacgcccggcctccaacgccaaacacggacgttgtcaggccaaggagtgcttcaattgtgcacatatctaagatgaactgaaattgaccctatgatcttcagctctgcccgcggcgccaagcccctcgaagtcatcggcacctacaaccccatcccgaaacgtcccacgaacttgtatgatgagaataccgaaacccgtccatataaggagattgccctcgaccggtcacgcgccaagtactggcttggtgttggtgcgcagcctagtgatcccgtctggaaactgatgagcatggtaagcacccttgtttgtttgatccgtgagagttttgggaatcaaggatctggacggctattgtcgggccttcgttttaagcagatcacatggacggggattacgttgttattatacggactgctttctgactcttaacttatcttaggctggccttgttgcgcccaaacctactacctttcacaaagcttgattccgactctttgatactgtgtctttccatggttttcacctccgacattctttgtgtactcggacggccaccatccgggaatttcaaggcatggtactatcagaagtcgcgcagtgtttctttattctttcctgatttggcatttttggcgttattgagttgccttgtgagaacctctgtatattaagtggcagcctgactgctctgagtctacgcggtagatgagccgcatgaatatctactgatatgacttgaatttgtctaggcggcacatacttcggaccgaggtagcctataccttaccagcatactttccataaactgctcatatattgttgagtcatgaggtacatagatgctactaaaccacactcgactaggtaaatcttaaatggatcggataatacccttggaacccgatcgtatttgtcagtaaacctgaaagtcaaaacatttgacgcgcctatgaccagttcaggcacgttgtgaagaagtaggtgctagtaaagcccctaaacagcggcttctctccacggcccaaccaaatgaactatcggccgctcgataagcccgagtcatttccctgtcgcagccaatcccatctgttgccggggttgggcccgtggcaattggtcgatgaccctggaggatcaccgggttttgactttttagattccatgggcgtacaacgtatgcggtgacttttattattataaaatgggttggatatgtgatgtacgtggtgatatgtctcatgaggtagtcgatatcgagccgttggctattgcaatctgggctggttgaagtagatatacagtatccaaggttccaataatcggtattgtattgacttggtaccagcttagggttgcctatccgagtctacattcaataaacatgcacctagtatatgtgtgtctcatttcaaagagccccatcgcgtgcagagccggggaacggtaagccgcttaggcactgtacttgcatggccggtgctcagcgatatattcatgatccaccgatcttcagagaacagaaaaagaaaagaaagaagagaaacaaaaaccggggcattccacagtcaccaccggtcacctcggggcacgcactgggccagtgtctgcatgcggtcggtttctagggccaaaggtgtaagacggcgtaaaattgagtccagattgtgtaaagagtgtgaccaggtactgtcatatacctgggagtacatgcagtcacgggcagacatgcatagaaccccatgtaccgctctggtcacataccggttccccattgagtcgcgtcgtgaagggcagatccatggatctggcactggtggactggcactcgaccgttccggactcttttcttccccccctcccctgcactctccttcatcccctcctttcaacccttttccctgcatccatcttaccattcgtgtcaatttccatctttatctcaatcgttttcaaagcgctcatacctgtcgcaaatccgatgagacaccattcgagtgcactcgactttcgatcgaatcgctaatcgccttcgccttccttcatttctgtcgttgcatcgcgcttggtgtacggtatcttgtcgcattaccgatcactgccccgacctccgactgtcaaaaccctgcgactccttttttcttcattaggactatcttccccctgtgtgatcgcgaaaccctagaaaaggcgaaaaaaaaaaaaatccaatttttttaaatctcgtggagggatgagcggcagctctagccagtccactcgtacgagtcccggctcttttggaactacgcagctcacagagtccgtgtcatccggttcgcccccacagcagtcactcccttcttcgcaggtgcctttgacggctcagcatgcgatgtcgaccgacgtgtacagtccgaatgcgtcgcaaccgccttcatctatgaatccatctttctcataccctttctcccctatcggtacaacagcttcattcgataccaacatgcgcttaggcgataacgatcgcaacctccagggtctaaatggcctgaatcgcggaaacggaggcgccattctcatgcgcaaactgccgcgaaatacgagccgcgaagccctgcgcagcatgcttctcttcgccaaagactttgtcgacgccgactttgtcaccttggacctgcccgaggatgatgggttcttgactgcgatcgcgcgattcattactttgccagccgccgaagaggccagatcactcctcgatggcaagccgaactccaaaaacgacgccaacatggtcgtcgagatgtaccccggtccgatgggcgcgaatctgtccaacacccgccgtaacaccatcgatcacaccgccacccgtgcgttaatgggtgcctcgaacggtcccctggcgcgtcaatcctcgcgctttaacggcactttccaaagtttggagaggctatccaacgccaaccccaatcaggctattggcgaaggacttcctccgacctccgaatcgcgcatgcatagccttttctccccacaatctccgatcggaaatggcattgataaccttccacgcataactgggaagtctatgatcgatgaggacccggacgaggagacgggcgagctgctcaaggatccggtgggctatgcggagaacggccattcttccaatatctccgctgggcgccgagcgaccaaccctcaaatcccgaccaaccgctttgccaatatgtccctatcaaccaacatgtcctcgccacctttgcagaactaccctggaggtggcgcgcaacgcatgggcggtggaacacccacatctggatacccgaaccaaggccatggttacccatacaacgctcagcataccccacgccacagcctgcctgctgcgaacccgaatgacctgaatcctccttgcaacactttgtacgtcggcaacttgccgccagacacctccgaggaagaactcaaggcccttttctccaaacaacgcgggtacaaacgactctgtttccgaaacaagcagaacggacccatgtgctttgtggaattcgacgaggtcgccatggcaagcaaagcactcaatgagctgtacggctacaagctgtcaaacagtgtcaagactggcatccgtctcagcttctcaaagaatccgttgggtgtgcgctctggtcaacccggcagcatgaactcatccaactcgccctctgggcagggcgcagtccccggaggcagcagcttgagtggaatccacaacaacatgttctcggccgtcaacggccctcctcccggactggcagcaccccctggtcttggcatgcccatgcctgcgcctccgatgcgcaatggcacctccatgcacaaccccgtcaatccgcatgctcaaatgatgggcaatacttcatacaacccgaactcgggcctgggaatccgaaacggagccaattccatgatgatgtcgccgccgccccctcctaattccggcggcaacaatccgacaccgaacctgaacggctataattccttttaccctgactacatgatgggtcgctaagcccatccaagcgttatattaagataatgcccggcatgtttgaacgaactgggatatctggcgcatttggggatcttcgtttcgtgagctagatcagcattcggcggctgcataactctcgggagtactgtttcggatttgctttctgtttttttctcttcttttctgccagtgcttttcttggctttcgtatttctgttgcatgggaacctgggcgctctcacattcctttttgtgttaattcgtttcattgggaggattgcatttcaggtcattgccaaacttgtattcttatctggtcggcgcgaggcgctcgagagcgcatgttagtttctgtcggccattgcgttttgttcacaccttcataccctcttgatttcttgcttttattctcgtttatctcgctcgttaccttgattcgataagcaatgcacactaatgcgtgtttgctgtatgcctacccaggatctatacgagctgttatctactttattccgtgattccccctgtttgttacatctatcccctggatctttctcgatgcatcgtctgcgtggatcggaaaggatttcgctgatttacttgctttatctattgcaatgcgtgtttatttctatgcaagtacgaaggaagggtcttatgtggctttctttgacttctcttctaatatctctctactcaaatggcatgagcgcgaaaggacatgacatcggctcacctcgaccacatattgtcccaggcgttcgcgttggttttatttctctgccatattcttcctgtctcggcggagacaaaggcgtccggtccatgcatttgctcgacagctcctctacatcttgcttgcattgccactcgttttgctttgggtctggcttactctgattttccaggagaagaatggaagcgtggcgtgtctattttttttagtcttcttcttatcccgtcttgctcgggggtatgataccgatacatttgcttcgatctgtacttgatacaatgaactggttccagtgaatctggagaatgaactcattaatcctttcataataatgttagtctgtaagagctatcatggacttttgaactcctttggccacttttcgtatattttaggatctgtgaagtcgaccttggaaggctttcaccgtaagattaggtagatacatatactcaggtgtcccaatatactccgtacagtatgagaagatgtttacttctgtacatattcagtggggataggtcacgtgatgacactaccgagagaagtttcttcgcctagacacctacacttcccgctccaacccgacaatctcccatccgcaattgttgctgcaaaagggtcaatggcagctggaactccttgattattattatccagcgtcttccattcagttcgacatcaaagtttccctcccattcacccatcatatcctccaagatgccaccccggatgcagagccggagtgtgtccaacacccttcttccctacctcacagctacctcctcatcctcactctcttccattccttcattatcctcttcatcatcacaatgtctttcgcgccaattttctgccacggcagcaccacaggcacagaccaagcttcgtcggcaaatgttcgaatggctcaacactgaaggagccgttttcaagcatcacgtccctggcgaaaccaactatctgactcggttaaaacagcgcggccccgaaacttcctcagatgcttcccgtccgttccccaacaattcaagtttcatcagcgagcctatcctcagtgaggagctacggaatgaggtctatcaccgcgttgttgaacagaagatgagtcttcgcgctgtcagcgtacatcttggaattgatatgaagcgtattgctgctgtcgtgaggttggtagaattggagaagagacaacgcgcgcaggtaagaccattttcccttctgctgttcccctttcccctttcctttcggaccctgcttcgaccctccacgcatatgatgagtcacaaaaaatcgattagtcttgaagacacccacatggttaaaccttactttttgaactgaactgtgttaccttacattttggattcctatcaccttttatttggtcgcttgagaactgacgaatctcaattcagggtaaacccctagcactgccatatgcccgggccatccacgagatggtccccaccacacccctcgcccagcaaggcgagcgtcaagaataccatgaacccatcaacgacctccccgcccatcctttgacaggttcccaaatcttctacccagttcccgaatcccgctccttcacccgtgtcgaggctggtcgcgtcttctccggcgccccagcaatggagcactccgaggccgcggaaatctcccacccctccgacctggccgaaaagatcatcgaggaccccaactccatcgcctgggttggcaagggcgccaacgctcgccaaatcctgcagcctgctgacgtgcgcattcctcaccctcacatggttgctctggagcgcgaccgcctcgcgcatcccaacgagcgtctggccgtttcagaaaagcagtccaagagactcaagcgtcaggacgcaattgagaaggagcgtcgtgagcgcttgcaggctcgccgcgagaagaagctgactgttgtctctcccgaggactcgcgcttcgactaccgtatcaaggatactatctacactccggagacgactggcgctgatggccgtggttcgaaggctgttggtcgtcggtacggtgtgcctcaccgcgaccgcacacgcggcgaaatcaagattcctacccgtgtggaggcttgatttatttgagatggtcccttcaaggactgtttcttgtttttttgtgtttttcagcaactttttcggctacggcctttgtaattttagtatgcatactcatccaaggatgtatgatggaggatgtcgcttatgtactataaccggatgatgtcgaactctttccatttcagtcacctcttgccgcttttaccactcgagtacaactggtgagccttacataatcacctctctacggggataatattaagagtgaagaggctttctcccatagaccgccactctgctcataattagtactcgtacccaggccattaaaaggggatacgttaaacccacgtctgaacataagcatgcaacttcttatcccgcaactcccgcttaacaaccgcattatgaatcttcgcgacatcggcactccagcccagcacctgcgtatacaagcgcaacgaataagaatcaatagcctgctgcaactgcacagcctggtacttccccaacgccttcaggtgcggatcgcgcggccaaggcgagaacggcagcgcgtagaccgacaagcgcacgtcctcaaagcccgccgcgatcatccagtccttgagcttgtggtagatgttcagctcgcggccgctcttctcgccggcgaagttcactgcctgttgccattccatgagcgcggaatctgatttcagcgtgccgtcgtcgctgcgggcccagacggcgctctcgtgcgattcgaagtacccgcctggtttgaggtggtcgtagatttggtgtataaaccccggccagtcggctacgcatctgcgtggtgtgttagtgttactctcgttagtatagaccgcgaatgcggtaatgatatcagttaccctgctaggcatcgtgcgtggatgaagtcgaagtggtttcgttcgtactgccattcgctttcgaagtcctccatgatgaactcgatgttcggggctacccagatcggctggatagggctgatgtcattcccaatgacgtgggcgctggggaatttcctatagtctggggtttagtcttgccgtatataaaaatggacgatgaagggtttcacatactcggcaatgtccatagcccaaatgcccgttcccgttcctaggtcaaggatgttctgcggtgatgatgtgatcggggcattgtagagctctcctcctagcagcatcagccatctgcgccgcttggttagccacattcgttcggtcgttcgggaatgcgttgctacacggacatgtgatgtgtctgaagaaagagtcagtgtgtgcacatggaaagtcattagttagttagggatggcagcgtcttaccagatccattcgatcctgctcctcctcgtcattcggcatcctaactcggtcagcctctacctagaggaacgtatgaaagtgtgcaagtacatataacctccctagtcgtcgatcgattggtcattgaagcttagtacgaatggtatgtatgtatggactacttaccgagcgggtactgcaataccgccgaccattttcatactcgaattccagcacgctctccgacagggaggtgagatcggacagctcgtcgtcgaattcactgttagtgtcctacaagtcggttaaattcccggtgtcgcgatgggccagacggtcgagtgagtctacatacgtcgccaaaaatgtcgaccgcgattggagccgcgttgacaggggtctgcgtgtcaggctcggcgttggttgggggtacagatggggctcgttcggatgaggaagtatcagaaaccattatgatgggaaaggagagcaaaagcaacggcgaaatttctagaggaaacggcgctggataaataaaatctattgcccttttctaacagcctcgcttgccgattcatttgacgcgagtggagggcttttgggttttatccaaactgtcgggttcaaaggagacggggactttggatctatcgtgcattctgtcgcctctcaatttgctgattgccaatgggaatcactggaagaggttggcaatcaaactccactccacatatcgttgtctttgaacccattggttcactggttaatatcgaggtggcccttgacaaagaataacgggtcttggtgcttcactatgatgggtttaaggtctaccggtcccacgtgacagcgtgctcagctttactcgggagcggaaagcggcatggtctcggcactaaaacggaaggtacccggacattgtatgcctcgtctttgtacatggaactctctaggactgaagatgtctgaggtttttgatctattgtactggagtaatcgcagttatttcaaactctttatcttactgttctggtggtcatgccaagtacttatccgcgttcctactatatataaccaataaacacttcgctaatgtcatacataattcattccctaaccaattctacaagctcaaaggaaacgaaacaagaactcgaaaacatataaacccgaagatatcaaaatcacaatgcacagcgcttcgccaagataaaatcaaatataaagagcgacagatatgaccagcagatcccgctgttccatccagcctccattcctcccattctcagtattagtcagatactagccaactctcaacgagcctccccgacagatcgacagcgtcgtcttctcgccccaacccatccagagatcgcatcggactcagagtcgtcttccttggaagaagtctggaaaatagagccgagtgaggcgagggcactctggagccatgaagtagtagtaggggaggctggagcagatggcatatttgctgactgcatggtcgagctgggtgaggggtgagatagtgagatagtgagatggcgagatggcgagatgcggggtttatagtttgtggttggtggtttgcgagaggaggtctttggtaaatggtatggtacctggtctggaagacaatgatagacgatagacaatagactggtatgtaggatatatgtaggggttggaatgtaagatagagagaggttcagggggtcagcttatggtatttaaggaatcgaagacaatacgaacatcacatgcgaacaatgcccagggagacgacaaagcccggatctggatcacctgcataagtacctaaatccgggcttcgtattatttgctttcaacggttccccgggttgcttctcctacttcggtcatgctgctttctcttgattggtgatgtgatcatcgcattgtacagatttacgtattgattcggccttgcacatagggcttgttatgcgatcgtcgcattggagcaacggctattggacgagtctttgccttgagaggcgttgtactgcgttgtactgcgttggatgcgagcagatctgaaaagagtaaattgtatacaatgtaggctcttggttatttgcgacatttttgtctcggtccttcgggagtatcgtgagacttacatatgttagtagagatagacagaagccatacatcgtataatttcaaatggctaggtgtatctgcatggatcatcacccctcaaataattagtgagataagtacaaggtaggagaatacaccaaggcctccagccggcagtcggaaacaaagaaaattatacattgaagaataaaagcatggacatctcgttcgtgtatatgaggatgtccattgcatagaagttgtatgcaaaagtaaatatcggtagacaaaagaagccagccacaaaggcaatgtgagcggcagacgcgtatgcatcgcaaaataacaaaatatatccatatggccaaaagaagatccacgaggaaaaccatgcaccgggtctgaggacctcgaagtgaagtgcatgccaccatgacaaaaatatgaaagtataggaaaagagacgttgctatacggggtattcaatgggagagacagaaaaccaaaccaaacaggttgaaaaaaagagtgatgggagcgtgtacggaccaaacaaccaaggtatggtaactcatccaaatacagatccgtcttcattcttcatcaagaggcacgatcgtcgcatcactgcctggcgcgccgtctcctgatgttgaatctatactgtcgagacttccgctaccccatgaatcctcccgcatgatttgcgcggcttctggtagggttggcttggtctcgaagtgattggacttgttagcgggccgggggatcgagggcgatgggggatccacccgtggcggttctttgcggtagccaccttgcatcgggctggatgatgtatcaacagttggcgaggcggcgcgaggagaatccatgaacccgcgccatttgcgccagccttcaaagtcaatcagggcttgcatgcagccccattctgtaaccttttgctcaagccaagggaatccgacgggctattcgagacatattagcatattatttggaagaataaaataggagatgatttaccttggtcaagaaatcattgcagccagcagccaatgcctcatgtcggtcactttgcagactgctagctgtcaatgcgacaataatgactggactccggaacagtgatagatctgacaaagtgtcctcttcactgaccgtacggtgaagcccaggtcttctctccgtcgcaggcgtactggacgcgctgaagcggccagaggctgtcttcgggaagacaccaatgccattcaagcgctccaagcgccggatctccttggtggcttccaggccgttcatcacgggcaactggatgtccatcaggaccaaatggaatccaccttgtcgccattttcgcaccgcctcttcgccgttcattgcacacttccagcgcaccttcaaccttttcataaaggcctccaaaagcttctggttgatgatattgtcttccacgatgaggacattgattggcggaacggtgccgtcaatcaacccgccaaacatagcaccaggagaagtggctgctttcgtttttcgcatcacgcgtggtgatgccgttgccgggggagtgtgtgatttcacctgcggagactccaccggcggtggtgccgcggggggtgtaggcattgagggaggaggagctgggagaggttgggaatgaggagtagggccagtttctaggcatgtcagtggctatgttaagtaaaaaaagttttttaaacgtacctgttataccgggagtttgagtgttctggttgtgaaggatagtgggagaatttgttctgtgtcgtgtcagaggaggtcgctgatgccgtgccctacggctgcccggagatggcagtaaaggagcgacgccagtgttgaggatggaaattgacggcgcattggccgctactgatggagctcccgagtgtgcagaaggtgttcccgcgttcaccttgaccggcggcatgagaggaaagtaatcgccatgttcgccgggttctgattggtggtactggtacattgaatggcgcggcgatggctttggggtccgccgtgacggggcatcgatcaccaatgcttcctcgatgttctgtcctccagggtagtatgcatcgagtatagatattaggatttcctccgggctcaagagacgctcagtgagacctggtcgattcgagccctctcgtggcaaaattcgaatagcaatatcaggcgagtcgaagcttctccccaatgaattcccgtatttcatgatgacatggtcgcgtagctcatctaccaccgcatcctctctgcagggcaccaaggtggccgagccaccgggccgtttgacccaaacccgacgtgtgaccatctcgcaaggaacaacgggcgtgaaaccactaggctggtctcccgaagaaaaaacactcgcgtccagtagcccactaatcaggtggtggtgtgtgtctgggagaagagattgccgacggatcgcaaggctcgggcgcttgcttgaaggaggaaagtaggaggtcggagggcgatcattcgtaggccactctgcaacagtatgcagggtcggagtcaatggagtttcgggcaggattggtgtctgagctttcaagtgggtggattggaaggaggtggtatcggaatgctgaggagtcgataacggaggagtttcaaggggagacgggagatcgcccgagataggagttggcaaggtagaattatatggctcggtcaacggcgtacaattgcgagttcctgtgtgaggctgttccgacggcgcagaaacagaggaacccagttccgggtttgtccctggggataggggctcctgtacctgaaggatgcgagaaggagtgatctcatccaaatgtttcgaagatgcgatgctataagctggggatttgttggagtcgagagggctcgaggggggttttcggttgaagtgggcactcggatctgcatccgcttttggagataatcgaccaagcaacttcgccttcagacgtgatatccgttccgtcattgtcgagtcttcatgccattctaagacgatagggggagaaaccagattctaggtaacggttgttctctgtcgatcgagataaagacaatctcgtactttttccggttcagacacgtcagtatagaccaagtcagagatgtcaaaggttaaagaagttgagaggggaaagtagcgacttgggcagagtcacgttagttgctgatctcccgggccaaaaaaagctatggcctttttaatatgcaaggattcggggggtccttgggcttttggggggggggggaattttaggggatatatgaaaaggnnnnnnnnnnnnnnnnnnnnnnnnnnnnnnnnnnnnnnnnnnnnnnnnnnnnnnnnnnnnnnnnnnnnnnnnnnnnnnnnnnnnnnnnnnnnnnnnnnnnnnnnnnnnnnnnnnnnnnnnnnnnnnnnnnnnnnnnnnnnnnnnnnnnnnnnnnnnnnnnnnnnnnnnngtgggggtggggggggggggggaattttagaggatatatgaaaaagtgtcttggattaaaattgggcatctcaattgttgggtttatttttctgttagcgacgagcatagatatagagctggaatgtagtatacctaagacccttgagcttgtatagctcgtcaactactcctatacctatagcactcttattgcagaaccccttaggtggcctgatcttatccaacaatccagataacataatacacgacacgattcacgattcacgatctacagataccccacaaaatagcctacgtggcacgcccaaaagtaccagagctagccagacgcagggccaatggttctcagcgtcactggaatattccgaagagcggcatctggtgttgcacttagtagcaggatataccatccatcttgtcctgtcggtggggcgtagaagttgatgttgtcctagctgcacataacatattttccatatgaagtccacacattggtttgtggtgtcgatgcgctagtcgtgtttgtagcaactgtgtctttacttgtctggccacttggagtagtaaatatgaccggacaagccattgcgccagtatccctcaatccaagcagattggtactagaagccacaccagctgtggtgaaaatggcagacttggtactagttgaggtagtatcggggtgagcaacccaagtgttttggttgtcaccaaacgttactgtggctaaatcggacactcatctcgaggactcggagttcaaggcacacaagaaaacgcaaacttgttggttgcatttgacatggccagattaccgatctgggcttgacctgttcggcaaatgattaacgtgatccattcatgggcgagatatgtttaccatctgcatagaagataggcagcccgtcgacgttgttaccatatgcatataaactccacggaccatcggcctgtcgcttatccattggatgcgctgagccaagtgcaaaaatggcaagagccacagcaaagataatcgaaatcatgtgttgaaattgatgttacaaagttctggtttgataggtatgtcatgatcaagagttggacgcgtttgaaatcgtcctctatatatccattatctggagaggtaccctatcatttccccaaaacctcagtgggacaaactcagggttgacttgtaagctgagccatatatgggatcagtgtgtcagaacttctgtcttggataccccggaatccttggtcttgtcctcccatgctgcctaacccatatcttaagaacgctccttaattaaaaaccacctccaatgctgacctggctgaacagacactgcccatatgaggcgcatggtcgcaccgtacagtatcacatattgagttacatctatatccatgctcgagattggctcgccatcatccttggcccccttgtctctgagtaatacacgagggtcaggcccccactccgaattgcgcctatgtcactcgacctgactttttcactgcccggagagattaactgacacacaagttcagggaccctgcgtcaggagcctgaaaaggaaaagatccgatcacgataatgcatggcccacgtggatgtggtcctacagatcggggcggcacagaactgcttagcttacatggctagacaccataaaatcttttgacttcacaataatggtcgatgaaacagatgtctcgctattgatgatatgcccacttgaataatctatttggcacagatactaagtcttgccccatgttgaaaccgagctggagggccttgtctccctgatggcttggtacatcatttttttaggctattatttctatttttgtcagttggagatgacggtatgccagcatctcctagtaatgagcgtggcaatttacgaggtgtattgccttagggttagagtaggcgttcgtaaaagatcagcttgagtctctgagggaggtatataaattacgttaactatctttctaggaagcagatatcaatagtcttattttgagatcctgaggtccagtcatcatgagattttcatccattatattcttggcaaatttacttggtgttggcattgcctgtgccgattgctcctacaaaccatcaaccacactgcgaccaatagccacgagaacccgacttcgaaatacctataggcctaccggtactccatgtgcaggaaatgcccccaatgacagatctgtttggtgcaattacagcattgacacagactacgagaatgtcgtcccagacacaggtgttacgcgcgaatactggtttgaggtcaaagaagtcacactctctcccgatggattcatggctccacgtccggccatgaccatcaatggcacctttcctggcccgcctcttgttgcagactggggcgactgggtggtcgtccacgtctccaaccatctgtataaggcaatgaacggttcgagtattcactggcacggtattcgtcagaactacacaaatccgaatgatggcgttccttcgctcacccagtgtcctattgctcccggctcgactatgacgtataaatggcgagctggccagtatggatcctcgtggtatcactctcatatcggtttgcaagcctgggaaggtgtatatggtgctatcattatcaatggaccggcgactgcaaattatgatgtggacaagggcgcattgtttctgagtgattggacgcatgaaactgtggatcaactacaccaagatgtccaacttcgcggtcctgtcaggaagttgtcaaatggactcctcaatggcaagaatgtctatggaaacggtacaaatactaccgggtctccgttccacatgaaagtgcaaaaaggaaaatcttaccggttgcgacttgtgaaccctgccatcgacacccattggaagttcactattgacaaccacataatgactgttattgcaatggatctcgttcctataaagccattcgtcacaaacgtcgtcagcattggaatgggttcgtttcttggcatccctatcgctctaaacatacgaatccagctaattttatacatccaggccaacgctatgatgttatcatcacagccaaccaggaatccgtggccgaatccttctggatgagagctataccagccgatagatgctcccaaaatgagatggccggcaacatccgcggcatcgtctactacggcaacaggcccaagcaaccgcgcacgcagtcattccccttcacaaacgtatgcgaagacgagcttttgacgaatctcatacctcacgtccccaaaaacgtcgatctaccagtttcgccagtttgggataggaacgtgacggtcagcaataccaggaacgcacagaatttcttccgctggcagttcaattccacctcgatgaacgtgagctgggagaacccgaccctgatgcaagtctaccatagcgatccgggattttctacttcaagtggcgtgattgagttgcctttcaagaataaatgggtatatctcttcatccaaaacaccctcgttactcatcccattcaccttcacggccacgacttctccatcctagcgcaaggacagcctgggcctgggaagccacaatgggatggctctattattacgcagaatcccccacgtcgagatacggccgtgctagccggaggtgggtggctgttaatagctttcaagacgaataaccccggagcgtggttgatgcactgtcacattgggtggcatgtcgatgagggtcttgcattacagtttattgagcgacaagatgagatccgggatctcattgattatactccgtttaatgagaattgtgctgcgtgggataaatatgtcaagacgaagaatgttgtgcagcaagactcgggagtttgacaatgcggagtttgtgtgatgaactatacagtggataggatagagagagggttgtatgttagatatatgtatttcaattgagctggttgtaacgcctcatttttatcagattattttgatattctttcagggctgccgagattcttgtggctaggatttatacggaggaactggcagcaggagcaggagtaggagcaggaagaatgcccttttcaacatcctcttgtgcgttcctcccgagtaaaagtaactcatcaatgcttttccctgaatcttttgcctccttgcgtaattttcgatagcggattcgccaggaaacatggctgatatatatccctgcctcgaaaacaaccaccaaaatatacataatccccccaagtatgtcaaatgacccttgtgccgctataataaaaatgtgtaagctattttattatacgtattgctaggatgcagaccaggcctgacctaatgcgaagagagaaaacagcccacccaacgtgtcgatgcagaggaagacccaatctattaacatcagcaggtgtccatcaagcgctgtaaatcagaacaaaacccactgaagccaatcacacgcccgtctctcttccacaattcaaaatacggcggcactagtcctgcaatgaggataatggcggctataaccccaaccacgatgtcgggccatgtcaccccgttattatatggtatctgtcaagtttgattagatcttccatcagaaaaaaagaatagaaagaaacatggataatactctcaatgttaggatgagaagagcctccaatcccccaaataaaacaattgtgcctaagcataccagaacagccttagttttgctatagttgctattaaaattgatgagctgagattagcagttcgatcacaataaatccatacctgaaaccaactcactggttataatgaagaacttgactccaactaaccagcgaaaagaacccgaagatctgaggctgaatctgcaacgggatattgacttgctatagcaataatcataaagatagcggtcagcgatagatgcagatacaaaaaaacatcgaaattactagacaggaagtctgccaattagggtaattcaacttacctgcagaatcagatatgcgcccattggaaccgagcctacatgaatcacaaatgtaagccaattttgatctcgaaggtttcttttctttttcctcccttctccttcctatattaggcgacatgcttcatatatcaagagactcgaaatataatcctcgaggccctaaacctgatgaagggacagggaaataacttacagcttgcccacagaaacatcatcgctgcagggaatccatctgtgttcttacggcgccaattataccagatctgtggtatgagttggatgcaccagagaaccgtcccgatggtgccgaggacgttcgatgccagtgtgatattattctctgatgacattgtttgtgtataagaaacgacaaattagacaacaatatcacaatatatctaaaatgaaaatgcctggtatagcgtagatatccacaaaaacaactagattcgatgaggtgggctagtacttatactgagcagtcagcctaaagaaccaataactatcctggaaaatagcggaaatataatcggagatttaggacttttattacgaatcgttgagaggacccagtcccttttttatgcacatagtagcgcatgagcacagatcctctagtcgaaccagtcatggctcagggccaaatgcaagaatatgcaggcgagtatcgagataggagtgggttttgaggcctgttggtgaaatggacacacagaatgcagggtggtaagcacgagtgcagaataaaccaataccagactaaggaacgacaaggggaaaagggaaagcttgggagaacactatgcagcggtgaagtcttgacgtttgacaggctagtctagtcgatggatcttcgcgattagtgcatattggcctgtgacggagggggagatgttgcctagttacttgcctagttacttcgaaggcctggagtgagtatgataagaagaagcagaaaggatatgttgtcccgagatatatttctaccgattttgagcaaaaatttcgttcttagatataactctccccgcttttagtcaaggaagaactgcggagttgagtactagaacaagcctatcagattcgctcattatgggaagaggggcaaaattcaggctcatgagctaaaactagataggctaatcgatggagaatgagggctggatacgagatttagggctatatcatatagcgctgttcctttctggtgcattgcatttattgcacgtaactaacgttcaatgggggtaagcagaggaaagttactaatataagttatcagcattgaataaataattacacgctgaaaccgtttgaatattaatagaaacaataccttatgttgtatgcgccattctattctattgttcatcaattccccgacgcacacgtggctccagcccctcctatctgacagcgaacgcactctcagaaattgagcaactggtcttcattttctcgaataccacaggagtctagtcttgaaagttatgtactggcaatcccattagtcgctgggaaaatgaatgaggtattttgaagccagcgggggaggcctagattgctaatctgactctccgggctgcctgaattttaaataccgccttctttattaggtatagcaatatattctgccatagttcttgccggcgtcgaggtaaaagcggtacccgattaggaaggtggtcagaataagaggtccattcaatcttgttaacatgcactgtaatattgttactatactatttgataaattcaaattcgtgccaacaaattatgtgtctgagtcccattcactcctggttgcgacaccacctccagacacattcccagaacatcgcgcgtgtctctcggatcgataattccatcgtcaatcaacatcgagctagtagaatagcattctgcatctttcgccactctgtctctgaaactactcacctgtttcttgagtttttctggcgaaagagtcaggcctttggatttggcactggctatctgcacattttccataacaccagacagctgatctgggcccatcacactgcaacggccagtaggccatgaaaacaagaatcgggggctataggcacggccacacattgcatagttgccagctccgtatgaagcgcccaaaatgatcgagatatgaggcacggtggagcaactgaccgccgaaacgagttgtgcacccattttgatgattccagcgtgctcggccttagccccgaccataaagccagtgacattgtgaaggaaaattatgggagtatgtctggttttgtcagtatttggaactttgagtttcctgtctgaggcttactgttgattgcacatgcgaatgaactgagtggctttcgccgcctcattgggattgatgacggagagctggttggcaacgataccaacagggaagcctgaaaaaatcaaattagcgaacggactatcaacttcgatagtttgatcctacccataatatgagccgacgcagtaatcatattcgggccgtatttgggtttgaagactgagagacgggagtcatccacgatacgcaacaaaacttcacgcatatcaaatggctttcggatatcggggttcacgattgatagcacatcctcaatggggtatctcgggggcagtgacccaatcaacccgggcactgaggggacacgtgcttgaagggaagctacccactctcgtgatttgtgaatagcatcgaacctatatgcccgagttagtataacattttgacaaagaccagatccatcatactcatcagacgcaatttggtctgcaagaccggttgttattgcgtgaactttggcaccgcccagctcttctgccccaatgacttcaccagtggccatcttcacgagcggaggcccaccaagaaaagcttgagcttggttctcgacaaaaatcgtatagtccgacaacgctggatggtacgctcctccggccgttgaggatccgaaaacaatagcacatgaaggctttccgtgtctagttcggagggcaagatcgcggaatagctgacctcctttatggaaaactttgaattgttgcggcaaaaacacgccggcctttttcaattagaaatgtgagtttcgaagggtgtgatcatgtgtaacttaccgattgaactaaggagatcagtggaaggtcgttctcaaatgcaatctccatcatgcggttgactttcagcactgttgctagtcagcaattgtattgagaatatatgttttgttgcttcatacctgtcatctcattccaagctcctccactttgggtcggaatatgagacataagaagacatatgcgtccacaaacatttccaatcccggcaatcagattgccacatggggtggaatcctcattgccaaacccggtaaatgctccaagttccaagaatggcgagtcttggtctagcaatagcgcgacacggtcccttgctaatggcacgttaaccgcgtttcttatataaacggagagtaaactcacgtagcagctgaccccggctgatgtgtcttcgtagagaaacatcatttccttcagcggaaacttgctttagagcttcctcaaatctgtcaagcacaggtgtccaactttctttgtttgcttggaactgcgaaccccgaagatcgatattggtgtttgccacaggaaacgacgattcggtcgccattgtgaaaaaagggtttagatctgcacacaatacgtatttttctcaaagtaaaatatatttcaagcagaatgtgccgcatcaagaatgtctaggccgagtttctaaggttgactcgagtggaggccgtcggtccgaaccccggaagtactaccgggagcggtgcggaccagctggtgatagtgtgggggaatgagatggaagatcattgaaattgtataatctggtaattacatttgtctgattggaagctgcctttgacatgttataatcaaccgcttgttcccaacctttgacaagtatacaccattcccttaatcaaaataccccaaatggattccaacctcgcacttgtctatggccctacagagccccagctatgtctcaagactatgggcgctctcatcgaggaccaggcagcccaatttggtgaccgtcctgccgttgtctttccatggcagtccgtccggctgtcatatcgccaactggcggaccggagcaaagccctagctggagagatgcttgaaatgggactgcaccatggggactgtgtgggtattttggcaggcaactgctaccaatatgttgaagttttccttgctggtgctcgaatcggatgtcctgttgttgtgctgaacaatacatacacgcctgcagagcttgaaaatgccgtcctaaggagttgtaagtctgctatgagggttttctttttaaaagggcaacagctaatatagtaacagcttgcaaggttgtcttccatgctaccagcatcggctctcgggacctgacaggtcatatcagaatacttcaagggacacaatatccaaatccagcactccccgatctccgccggattatctcactcggacttggagaattccgcactggagctattgaggttcagccctatgacacggttacttcgaatagtccttctgtgtctataaacaatgcgacactcgagcacgcagagagacaggttactccccaagatgtggttaacttgcaatttacttctggtaagtgacaacgaaaatccagatttcaaactgaatattcacatatttcaaggaaccacggggtctccgaaagctgctatgctcacacatacgtaagtccgtgaaattggtaactacttggagcatgtaaattaatctaacctataggaacctcatcaacaatgcacaatttgtcggaagagcaatgcaactgaccccggaagatgtgatttgttgcccgccacccatgttccattgctttggtctggtgttaggatttctttcatcatttttctacggaagttcaatcgtctttccatctgactattttgatgtcgcaaaggtagtcgacgccatcatcgacgaagacgccacggttcttctcggcgttccaaccatgtacgtggccgagttagaagtgatggcaaagacaggacagagaccccggcgactacggacaggacttgcatctggatcggcagtctcacaaaatctcatgaaccagctgcgagagattatgggcgtcgagaaaatgctgattgcatacggaatgacagagaccagtcctgttagctttattacttccctggacgatagcgatgagaaaggtacaacaactgtcggtcgagtcattccgcatacggctgcaaaggtcattgatgaaaagggcaataccttggctcgagggcagcgaggagagctctgcacaagtggatttgtgctacaaaagggatactggaagaatgaagagaagaccaaggaggtgatgcgaagagacgaaaacggcgtcttatggatgcacactggagacgaagctatgattgattcggatggatatgcccatatcaccggtcggatcaaagatcttattattcgaggtacgttcaattctctgatacaaatccccaaacccgctcttactgatgtttgctgccaacaggtggagagaatatcttcccgcgagaaattgaagaacgattgatgtcccatgcatcagtttccgaggctagtgtagtcggtatcaaggatgagagatacggtgaggtcgttggctgtttcttgaaggcatcggtgcagtttcagaggcccagtatccaagagctccagcagtttgtcggagagaggctcggccgacacaaagcccccaaacatgtgttttggctaggagagaaaggtgttggtgatgacttcccgaagactggcagtggtaagcatcaaaaacacatgatgcgggacattggaaatcggttggtgggtatgttcaaggcgaaactttagtatagaacagataattacatttatttgcattactattttctgttgcggagctctatatggatatatatcccaatgacgaatgcggacgagaaagagcaattacctagtatcaggttggcacaaacatcaaaacagccctttttctctccgatttgaaactcccttgtctttgcaatgtcccttggtctccatttttgtccgaacaggtattgccacggaaatgtgtgatttacgtgcatcccgtccgagctggtccactcctcggtccgagatccggatactaaatttccccgcgtggagtgctttggagcggaccgaagcagaatcggaaaagaagtttagtaatatactctgattaactaactattctattgtatgataagcgatattgaagttcaacatcctaaaattgagatcaaaattcgacaatgggtccggctgttcgaatcgtcgaagtcggtccacgggacggccttcagaacatccgagacacaatacctacttcaattaagttggaattgattcaacggctccagaagacaggcctaaaagctattgagctgacgtcagtcgtctcaccgaaagccattcctcaactggcggattgtcgtcaggtcttgcgtaacccggacatcaagagactcttggatagctcgcaacttcggcttcctgttttggttcccaatgctaagggactcgagattgccatacagcacggcgttcgagagattgctgtgttcatcagttctacagagggatttagtaaagccaatatcaactgcactgttgcgcagggaattgaacgggctacccaagtggcatccctggctatacgttctcaaatcgctgcgagagggtaagaaaactggtcccattcccttatattacaatccaatggcaactaacctaaacagctatgtgtcctgcattttcgctgatccgtatgacggtccaactccattaccagcagtcctccgctgtgtaaaggccctcctagatgccggctgctacgaggttagcctcggggataccctaggcgttggctctccttcaaacgtgcgcgagctcatcaactacctgaccagcaacggtatcccgccagagaagctagcaggccacttccacgacacttatggacaagccgtagcaaacgcgtgggaggccttcaatagcggaatccgagtgttcgacagcagtgtcgccggtctgggtggatgcccatttgcaccaggagcaaaaggaaacgtcgcctccgaggacctggtttacatgttccacaatgcgggtatttcaacaggcatcgatctcccaaagctagtcgaaacgggtgtatggatatcgaaacaacttctgaagaacaactcaagtcgagccggaacggctctggcaaccaaattacagctggcagccccaagcacacaatccaaaccaagagctcccggcctcaaatgggacctttgcaacgaaacacagggtttacagatctaccgatcaggcgtgaacttgaaaatcgtcctcaacaggcccaagaacggaaacatcctgacagcaaccatgatctcggatttgacatcggtgatctcaaatgccagttctgatcccttaacctcccgaatcatcattacagccaatggaaaattcttttgcacgggaatggacctcggcaagggaagcacagccgttggagaaggcggatcgagcagcgacgcacaatttacgggtttaacgcgactcttcgaggcaattgatcaatgtcccaaagtcaccattgcggcggtgaatgggcctgcgtttgggggtggagttggtttagctttctcgtgtgatatacggacatttacacaaggagcgaatgtcacgctgagcgaggtgaagctaggactttgtgcggcaacgatatccaaatatgttattcgagaattgggggttgcatttgcacgagaggtgatgctttctgcgagagcggttactcctggtgagttgaaggggttgggaattatttctgagattgcctcggaccaggagaatctgcgggttagagttgatgagcttttgattcgccttaaagctgcttcgcctaatgcttcgcggatgtcgaaggaattggttcgacttgcctgggcgcatggaggaggtgatgcacaagctgctgggattaaagggctatttaaagagatgatgcggtctgatgcagatggagcatatggcgtgaaggaattccaggcgaagaggaaggtagattgggatgcctatgttctagggccgaagcccaagctgtaaaggaccagattttttggttttagctagtatagacatttaaccaaggaatatggacaatatttgaactcttctacgagtcttctacaactcttctacggctgccgaaatccaccctcgaacgaatcagtagatggatcgaagccaaacccgttttgtggtagaggaagtgagtaaatctatggaactcctgaatttggatcgattactaatgaaaagaaagggattaactaattgactaattatagttctactatcatttttactatcttagagaagactgctcggttaccttactttctaggaaaaaaaaatatacgctaagtatgatagtagcattaataacgttaaagataatgtagcaacggcttccgatcgtagagaaaccaagaggagttaccgaagctatcaaaaaactgaaagcccacatggtagcagtggataccgcgttcactgcggcgcggatctgaagtagtaccatttccgcagcatagaggaatgttaggccgcaatagctaaccgtaaagatgaattgaaagcagtacaggaagaccacggccatggcaagagctccggtggtttggctgcagagggggaggtcgtgcctgcgaggcctgccatacagattgccatggccccagcactccacagcatgagagggcggcggccgagacgatcagtaatgaaataagcgatgtaaccaccgagggggagatagctgtcttcaaatcagagcaagaactccgtcacaaaattgaagttttgcagcccaataaccacgtctccctcccctggacccggaggacgatcctggattgcaacgaaggggaggaccatagggtccccatccataacatttggcattcccgcaactgggtttggtgtcatatccacaaactgtgcacagtatggttgctgaagtcgtgccggctgtctgattagtggtggaatatttggagtttgtgcctggagggtccggatgtaatttcgagttagcgggcggggagcaccgtttggagccaactgccactgctcgaaggagacatagttttttctaacaatgataagaacgaccattctgacatcaccttcagaatctgcgaaccacttctgggcatcttgtcgaagtcgaccaagcgattctgatacacctgtttcgattataaatgttgggtagccgacgtttccaatcggatgagtacaacgagagggaggtacatatccattatccgcttctttgcccttcctcatccctgatcggtaagttgtcgatccgatccaagccgttccttcgctagggacacccatagccttgtaagaatcccgaatcacttcagtgaacttatcagtggcgacctcatgttcgctgcgggggacgaccttgatcaggccggtagagccctcccattgaaatcgaaatgcgattcccccaagaccgccgtggtcgcttgtaagtgcttcgattaccggtgttgatagaccgagcaccactatccattgatttccgtctgtatgttcctcggaccatttggagatctggagtgcctctagacgcaggcgcctcagtcgtgaaaatgagaccacatgaccttgaggtaggtcagacatgagcgtggggttctctgccatcggaagtagaattctgtcagcatgtagattcagacgagggtttcgtcgacgagatatcacagattctactgaatcagtgtgtcaaggatctctgatgatgggtgacataatggaaataaagagggtgacgtaagttagttatggttaatgtaggtagaatattttcagacgcaaggttaaatccagaagaacgttttcaaggcggtattagcgattttgctctgctttgaaatatgatgagagtaagtcgttaggtaggagtagagaggagaacaagaagaatggaaggcagggacagcttcttatagttatctgttgtggtgctcacgtgccgatcacatgccaaatcaggcttcacatggctatttagttaactagatcttaatcattgtagagaatctatccttcttcatctctctctcgctccaagaggttataggccctctctccatcccatcagcattgtcctccctttgctaaaatttcatcaaaaaccatcaattttccatcaagctttgcatcaattttcatttctatcagttccagccaccaaagggcgctgtaactcgcttcataagcggtcgtccatagcttagacagctcgccttataagcggctgccctgaaaccttgggcggatttatactttccgccggtccggggtacccgaaagagccgtccccacaaactcttccccgcactggggagttcatccttcccaccttggaacttctcctgactcaaacccggccatggacatgatagattcaggtggtattaagcggatacgacaggcttgcgctaactgcaggtaaaattcctccgtcggctcttttttgccaatgctgatcacaaaccctctaggcgcaaaaagaccaaatgcacaggagaccgtcctatctgctcccactgtcgtcgtaatcatctagcctgtatctacgaaccatactcggccactctggcggaaaatccccctgcgcctaatccggtcatatcactgccgccagtcgagaataataataatgtcagttgggaattcctgggcactattgcattatattgatttagcagcaggttgaacttttgcaaagaatcagcacaatcgagtcaaggcttgcggagctcagcggaaagacaactcagcagtacgatattcatgtcgattttagttaccaattcttgatactgattctaggggtttctaggaatgtaacgtctcgtttttcacacacacaaggccacgtacatttatcaccagaggttaataccttgtcacagcgagtgccgtcaccaccacctacctttcaagatcatgagttcgtgttctattttatacccctgaagaaatttggccctgtactaagcgtacggatagactcctccctccaccacacgtcctacgctcagtaatcgacacgtactttttacgcgtccacaaccaaccctactcttatttccatgaaccctcttttcgccagaagttagaaagcaactctttaccaaaatgtttgatcttggcagtgctttcatccgctgtacgattctcgacccacgaattctacgcgaatcagacgcgcgacgcatcgcaaaagtacgcgagagagtcatggctgtcagttctggcagaccatttgacgatggaagacagtctgaatgttcatgtggtacagacggtaaacttgcttgcagtggttgactatacaggtaagatggatggacactctaatttacttcctgctaacattgtgctatttcagccggtcgcgcccggtcgggatggctcaaaattggccttgcagcccggatatctcaagacttgaacctaatgtcggagcctgatcaatggctctcttattcagaacaagaagagcatcgacgggccttttggtcaatttacctccttgataaattgatctcctgtggccgatctcgaccgcttatcattctagatgaggattgcgaagttcaacttccatgcgacgagcacacttttcgacatggagaaaggagacagacgagtacaatcgatcagttgttgaactggaactcgaagtttgacgaaagccccagtccgttttcactcgttcttttgatggcgtcgatatttggccgatgcacacgatacgttcaccagagtaagaatatggacgagattccaccatgggatccaaagtcagagttctctgcaatcaattcctctttgctactcttagaatcatattctaagagtttaaactggcaactttcggatgtcctctacggaagcgttcaggtagatggaacagtcaaccgacaggagataggccagcttatatttgcccacactcttttccacctgtgtcactgcctgctaaaccatccgttcctcgtgagacgatggctcaaacctttcggggccaaggccccagctagtttttcctcccgcgcccttcaagatggatgcgaccatgcgaaacagcttatggatctcataaagcaggctacggaccatggctgccttgttgaatcctcattctatgcatattgcatagctgtagctggggggattcactctctagccgtacacttcaatcggaacaagggccgcgagtcggacagttcgcactacttgcaacagagcctagactctttggagagattagcaaagccttggacccacgcaggaaatatagtaagtttacctctgctcagtgaagaaatgtcgactactaacacgtttttgattcaggctatctcgctgcgagaattccattccatttctcatgctttcgctgtcctcctggacccacgtcacttaatggatgagttagactttgggtccgaagagatcatgtggtcgatgattgattatgcgataatgggcgctgatcccagcaaaaagcaactctcacccaaatccgcagcgaacataccgtctcccacatcgtgggttcttggcgccggaattctgggacagccgggatatgacagccccaatgggaatatctttgggggtctcaccccctcaatgcgacttgaggaagtcgaacaatttctgaactgtagcccgggaatgaggaacattatctaaattgaaaatgtgtcttcggacgggaatttgcgactttcgcgggctcggtccgtccggtccgatgacatattccacgcatatcgactaggatgaatggataataagtagattctcggagcaaagaaaaggaaggttgaacgaaatatcctcatggctcaacaacatcaagcgtcaccctgggagggtgtcatctcgggtacgacggcggccattctggctagtgtgattgtataccctcttgatatgtatgattatggaccaatagcatgctttcctgaataattctaagtctattctagtgttaaaacccagttacaagttcacgttcaacgacagaaacagcaagatgccaacgatcgagaaaaacaaaccgacacatcagaaaatcctacagcctacgctcatcatgacaacttcatcgatgcaatcagctacatacttcgcgaagaaggtattcttggtctatacagtggcttgggaagttcaatcctcggcacggcgtcaatgaactttgcctatttctactggtcaacaaccgcgcaaaggttacaacaatcagcatggcacaaatatggaatctccgacacaaacagtatcgccaaggagctgggtctaggcgcaattggtggtgcaatggcccaactatgcacaaacccaatcgcagtgatatctacacggcagcaaacccggaaagcaactgatcggcaacgatcaatgtgggagacaatggtggaaattatccagagtgaagatggctggaccggactttggagaggcttcaaggtcaacttgatccttgttatcaatcccatgattacatatggtgtttaccaatggttgaagggggttctacttggactgaagaagacaaagagacttggatctgctgatgctttctgtacgtcttttcgatatatttcccgggctgtctgctaacatgactactttattagtgctcggcgctttatcaaaagttctagcgaccatcaccacgcatccgctaatcgttgctaagacaatgctgcaatgcaaaccgccagattgtcggaatggtaaaccgttctcgggatttaccgaagttcttgtttatattgtcaagaatgaaggcctcctgagactatacaagggcttggcgccgcagattatcaagggctttttggtccaagggttgatgatgatgttgaaagaacggtatgcccagtactcttttcaatttcaatatcacacatctaatatcacatttttaggactgagattttgatcagaagagcaatactacttaatagaaagcagcggctggcttctctgaagtaaggaattaggggcttggggtcatcaactaggctagaatatcgttcattcgcagatccggagtcggtgggataatttattacattaagtcattttatttcctgcaattaattcttgctcaaagcattttgtctgctgtaatgcgtaactggcaaatgtgcctgcgggatttgccatagatggttttagactactcattccaggcctaacacttgttgaattctaaagaactctcacaaatactttgttatactagacttttgttacttcaaactattcattgcctatgtggtacttccagcggttcggcttaaatcgtgctttctcctcaacttatcagtttaacataacattgttcaaaattagaggtaaaaaagctagaacgagagcgacaatataccaatttaataatgtggtcatcttcactaaggaaatatcaaagggctcggaaggatagggatccccggtccttcaccccggtccggcattgtggagcgcggtccgatcccacggtggtggtggttattgttgtatactttgtcactattcttactagaacgcattaataactatcctttcctaatttcttattcgctcattactccaaaataccaattagtgataacattgctcgctcccgctccgagatatataacacaacatccaagttaccccagcattaagttacaatttcgtttgatctactctcttcgaagtcccattacctatttttataaagaatatggcttctttttccactatccccttcgccgatcctctctggctgaaccgcggttacagtccgtactacaatgactcgcatcgccgacttcaaaaagaggtccgcgagtatgtcgacacctacattgcgccattttgcgaggaatgggaaaagcaaggcgttgtaccacaggaggtatgtacaagactgtatcaaggacaaggagatgaatatccgctaaagatttcctgaaataataggttcataagcgtcacgcggagctcggatacactgctgtcagctccttcccacttgcggtcaactatctcaatggtcagcggcttcctggggacatcaagcccggagactgggatggcttccacgacattgtcgtcatcgatgaattagcgcgctgtggatatctcgggattgtctgggcattgggatgtggtaactccattggagggccgccagtgatcaactttggcaatgatgatcaaaagaggagattcctcccggatatgttgaaaggaaacatcagattctgtttgggtgtgaccgaacctgacggtaggatttctgaaatatcggattgagtacattgactaattaaaagaacagctggatcggacgtcgctggaatcactaccacggcggagagaaatggagatgtttatattgtcaatggagcgaagaaatggatcacgaacggcattttcgcagactattgtactgctgccgtcagaacaggaggggagggaacccagggcatctccgccctgataatcccgctgaaggccccgggagtaacttgcaagaagattgaaaactccggcgtccatgcaagtggatcaacatacattgagttcgaccaggtagaggtgcctgtggccaatctgctcggtgtggagaacaagggtttccctgtcattatgaacagtatgtttcccctagatagccacggctagaccaaagccaattgtccctaactcttgacagacttcaaccatgagcgactctggctcgcatgcacatctctgcgcatggcgcgaatttgcgccgaggatgcataccaacacgccatcaaacgcgagacattcgggaagaagctaatcgaaaaccaactgattcgcgcgaagttcagtgcgatggcccgaggcattgactcggcatattcctggatggaacaactagtctatatttccgaaacagccaagaagcagggcgtggatgcttccatgggaggtctcttcgcaaatctgaaggtcttggctgggcagactctggaaaaggttaacagggaggcccagcaagtgatgggtggtcttggatattcgaaaaatggccgcggggcaaggatcgagcaggtcagccgtgatgtgcgggtgatggttgttggtggtggcagtgaagaaatactttcagaattggctcttaaccaggaagttaagagtatgaagaagttgagtaaactctagatattttgctatgttgtttttagttcaaatcgatctcacgtttgctcaaagtgactgaagaatcgttgcaaaagtacaagtcaagaatttcaaccttccagcctttcgatgacccttgggaatagggaattgttgctcgtggatgtgaatttacagtaccgccttcctgatcaggtatcatttataattctgctggagtttaatataaaggcggtatacaaattgggaggcggcggtaggtgctcaaccatattgggaaggcgataccgaagattcaggggggtggaagcaacaattccctacgaatatctccgagggttatactgcttgccttttgggatggaattgaacttgtattgatgaatatcgatcaatgaacatgctaaacaatcgaacaaagaatctttccttcctccaccgcatccccggtcttccattctgtttgaaacttccctgaagccgcgactgaaatattgacttccatcttcatactctcaataaccataaccgaatcgccagacttgacttcgtctccattctttttcaagactgaaagaactttgcacggcatgggagctgcaacagtcttttgctctgaacccttatttgcctttgcagctgatcgattactctccgcaaatgagagcagagtatcgcgtttgaattcaacatgagttccgatagaggggaaatgacaataaatccgttgaccacaatcgacttgtcccgcgaaggcatgggcccgtgttgaagggatagctacatgaccagtgagctttgatccattcactgaaatctcaatggtggatgtaagccaggaatcgggtagagctgggttgccgtgtgcagggacccatgagataacttggacttggtatgccggagaagacgttgctttgccggtgcgtaatgcttgactgatttcattatattgagcggagatttctgctgcggctgacacctcttcatcggtggtggtatttccattggggattgggaagagatatacatcctcaacgccggatgaaaccccggctgggcttgctttccaaatgcacatcacagcgttttcaggtgccgaatcaacctcctgtccagtctggctaggccaattgaccgtagttgtaacatcacaatggatattgactgggtcgaacctttggtttcggaattgcatgcggacattccggagaggtttgggtcgtgacaaggctgtggcgtaatctggaagtcgtcggactaccaagcttggaagaattgaggcgatggttttgaactcaggcagtccctggaccgaaggaggctgaagaagctcattcaggtgagatggaatgaacgcagttgtatagctaggatcacggaacgccgggttcaataaacatgatcgcatgaaaagttgatttgtcttgactccaacgcaagcggtctgcccaagaacctgagccattttctcaatagcaagcgctcttgttggagcccaaacgacaagcttggcgatcattgagtcgaaatagatagatactgatgaccccgtttggattgctgtttcatagcggatatcgcggcccggggctaaaggcccacttgctggtagccagaggtgaattttgccatgttctgggaagaattccctctcggggttctcagcacacagccggcactcgattgcatgtccattctgggtgacattccccagtgttggaaggcttttcaggctgcctccagctgcaacgaacagttgtaaagaaacaagatcaacccctgtgacttcttctgtgatcggatgctcaacttggagccgcgcattgacttctaggaagtagaattggttcgtcttgatatcgaccacaaactccaccgtaccagcattttcatatccaataagcttggctacccggacagcagtttcactcatcttttgtcgagttgcttctgtgaggaaagcacacggggtttcttcaatgaccttctgatgccttcgttgcacagagcaatccctatccaaaaatgaaaccacatgtccatgcgagtcacccatgatctgaatctcaacatgtttgctgctctcaatgaatttctccaagatacaatcatctgaaccaaatgaccgacgagcctcggattgagctctttccagttcaaccttaagctgtcccgcctcgcggacaatccgcataccctttccaccgccaccagcggaagccttgagcatgaccgggaatccaatctccgtagccactctacccaaagcctcggcatcttggctagatcccgagaatccagggattagggggacctcgggggcatgagcgcgcagataatcctttgatgaccgtttgtcgccgagagtagacatggcgctggggctggggccgatgaagatgagacctgcgtcatggacgcgctgggcaaaatctgcattttcgctgagatagccatatcccgggtggatagcttgagcacacgttgaaagagctgtttgaactagtagttcgatgtcaagaaacgggttgcgagcactgcggtcaatgctgccaatgttgatggcttcatctgcgtcacggacatggagggaagatgcatctctgggtactcattttagcgattgtcctcgatgatatgttggtagcacaatttctgagcactcactcgtcgacatagaccgccacggatgtgatattcaatttccggcatgtctggataatgcgacaggcgatttccccgcggttggcaatcaagacttttcgtataataggtcttccatctttgcccaagggtggctctgcgacaaataatggcttgcgaagaactgacacatcagtgcccttcggatcttgggtgaaagtaacagccatagtgtgatcgcggtatgtcaagaatgggatttctgaaggttcaaaagaagcagataatcctataggaaataccagctccatcacttcacaatatcaagtgtccgagctcttgctccggactccacaacttcggtccgacatccgcatatgtgtgggggaagccgaacccggaccggtcaacccgcaccacaatctttgcttggccacgcgtaaataaggccaatcgttgcgaaagattgaagatcaaatgtcggggcttttaggatgccttagcaaggagaccgtgggaattaagaccatgcatgattccgatactcttaaaggtcgtccagtctatattaacgtattatagcggccaacagtcggatgcttgattttaatggttttatggcctaattgggactagctctgaccagttctagaccgcctttgacaccgctcaataccatcttttgtaagtagtccgtacgcatttaagagacgacgctgtcactatccatggggtaattcaaatgtcttctacccgctgcaggctgatggcacttcgccaagcggaaaccagaggatacagagagtttggaagttcatacggtcggtgggaagaaatccaggcttggttttctaaacgttttgggccttggtatcggttgcgctatcagcttttctccaggaaagtccgggactacggcgggtgtgcatggctttaaatgtgggagattcatatgattagaggattttaacgtctaggatcgatgaaaaatattatttgaggaggtataaatagcttcatcgtttcaactttcaagtcgttctcaaaaactttggtaggccaacctggaaataaacaatgatcgcgtctattgtccattgccgaaagtcctccgttcgagaatttgcttgcagagttcttttttaagagaaaatctaaaacaaaagaacactacaaaacgcgatagatccaaatcaagacatacagcgagcaatagaaacacggtcgaacaactcctcaaaggcgagagatattcagccagtcattagttctacgatttcagaccgagccgagcagacagtccgagaatcaggacaatatctctcatcggagagctttgacccagcggggaagcgttatttatttcgcatcttgcaaacgaacaaggatgtcgagcgtgtagtcgtcgagtggttcatagtaagctctatccctcctccatcataatcgtccaatctctgatatatgttagaatcgaaccaatattgagagagtggcaaaaaggtttcgacgaacagtttcccccgatccgagatcacacctctcacaatggttcttgatatccactacgcatatgccgcgccctggaatcatgagtcaagggatgtccccggacgaccgatctaacatcataatctggattgcattaggaaagcttggccttgataatggatattctcacatgatggagagtgggcaagacatgagtctggatgggcatgagaaggtccatttttctggtcaagccgggggccttgccgtgtttttattattaaatatgtgacagaatatgagcataattgaaatatgagttatcggcggggaatggcatcgtttcaggatctagctggggagctcgtaggttagatattgatctcctgctagatgacgaattcattggattgtctgccaatacgtctgtcataacggcgcgtccaatgcgcttctacgaaagttcagtccgcatcacacgtctttttcttgtagtctgttatttaaggaagacgatccccttgtccttttaatccttgaactcccaccattgtttgtttggctcattcgacaaacaacacacgtagtcttcgactctgaggattacagcgatcttgataccatcctcgacttctgactgccaagtaagagggaagacatgcggtattcaatggaaggatgaagaatatattgttcattgtgactgaaaagatgtgaactataagttgctcataactggaaagtagggtactactggatagtagaagtagcaaaagatttcattatctgttcctttattcgatagcgccttcaatcttagagatggggagttcaaaaaaaggtaaaaccgcaataacacttcatttcttattctcttgttatagcacatgaacatgggtgtactcttcgtcgtgatttaggccctaccattcaatgatccctcgggccaacttgtccttttcttgactgaaacgtagagattgagtggacggacaagttggaactcgggatcatattgaaccttatcttcgtcatcgagggcaaactcatagcgatatactaattcgctgaaaagaatcttcgcctcgagaagagcaaagttgaaaccgatacagccacgtccccccatggcaaagggaagaaaagccgcacggtgacggcttttaaccttatcagtatcccaacggtctggttgaaattgggttggatcactccagtgttcggggttagagtggaggtcgtaaagagcgcaaacaactacactatccggttcgaggcgatagccgccaggcaaaatcacctccgtcttggttgttcgagcgggctgaaaagcaggattgtgaagacgtagagtctctttgacaaacttgtcaaggaacaataatttattcaccaaatccacgttccaatccgtgctcggtgtgacgcccatgtccactagctcctggagaagacggtcttgattgcactcgtaggtagtcaggcaaaagataagccacgacaaaagagaagccgtagttgcgaatccagcggacgttaacatggagatgttagggacaatcatcgaacgtggaaatgtctcccccttctcatcggtggcgttgatcaaatactctaccaggctagatgcatttagagctgcattcgccatcggcattttttgcatcgctccatcggatttctcgattttagccacgatttcctcgactagtgtgtaacaaagtcgatgcgattctctcaattttcggggatcaccaaaaggcagatttcggtaccaagatccgcgagaggccacctttttgttgagcgcaaacatgttcaagatcgacatgacgattggatgaaaaggcgcgtcaatttcagccaggtggccgaattcctccccgagaatgaccttgcccacagtctcagaagcaagcttggtcatatactgatagacgttccacgattgcatgttttcggaaaatgtgtcaaacacagcgaatgaacgtcgaacagtctcctgcatcagcggcgcatagtgccgcaccgccttaggtcccatggaagttgggaggtatttgtgagtaagacgccacgtctctgtttcggtatcactgacaaatgtagcgatgttgtctttcacgccccgaaggggatggtcgtcggtgattcttttagtgaagtgcagcgattcgttgagcactatagctgctatttcaggatcatccgtgagataatttgtctttcccatgttggtagtcttgatcaatcctccgtatttgcgaaagaggcgaaaatgattaccaaggtgatctggaaagatttcatagaagctacccaccaagggaagacctttcggaccagaaggctctcgtacaccatggttgccgatcctgataccgataggctcatttgaatctagcacttcaccgatcttgctgatggggttattggacacgtggaaggagacccctgaacgaattagtgtttgttcatcgagacattatccacaatggatcctaccagctggttgaatgatatggaaggaccgagcaacgacggacttcaagccgttcaaatcaagttcctgggcaacttcaatagactgtgccgtcgacgggtcatccccgatcaggaaaaagcttctcgatgccatggtctagcccagtcgttggaatgataactggtaagaaagttcgtgtaaccaaatttagctgtttggggacaggatcatggccatatttataagcctagtcaaacctgaaatacattcatcagtaaccctgcggggtgcgtttagcggtaccattgtaacgaattggattttcggtcgagccttgtaacccgaggctcggataatacagtaattccattccatacacaatattgagggtcgtttcgagtccaaacatgagtaattcgagttagacttcggcaagaaataaaccccacttgcctctcagaccctcagggtgccccgcacgaccggccgccaccttcaccacccccacccttcctgatcctctgagtaaagcacgtgaaattatactttcggataatcactgcatgtattcggtccccacgtatctacaagacgtggctcttagtgaagcatgcttcatggctggcagtaaataccttgcaggcgtgtaatgaggagtttttcgactgaacgttggacgaaacggcactggtaggttcactgaataaacatgggtattttccgtgtatgtgggggacaacaataggtataaagaggtcgtttcatcgctataattcctcgtgtacgaatttaaatcatctcgcccaagtccctgaacttggacttttttatatccgatctcccctggccttgtttgtccttcttcttcctaatggcccaatcgcgcgtgccaccgactcctcaaatggagttgcccagcatacctgcaaacgaagtccggttgcatcgcaaaacgtctgatgcgtggatgattgtgcacaacaagggttagtctccgggtagttgttgaatatattggtgaattatcatcacaggactgacgtaagattagtttacgatgtcaccgactacatggaggatcacccaggaggtgttgaaattctatttggggaagccggaaaagatgctacacaagtgttcgaagatgttggccattcagacgaagctagagagctcctacaaagcttgttgattggcgagatcccggcatctgtgggtttctccattcattcatccacattatggcaaaaggtactgatttgtctgttcaaggaacgcgtggccgaagtggagatctatcgaccgactttcgaggtgatcaatcagactacagccattaagacaaagtctcaaccaagcaatggtttggcaagtttttggtgggctgtcgctaaagtctgtctgatcggtgcctctggcgaagttgcacgcttgatttatcattatcgcaagcaatggccaggattcatacaagcttcgctgggaggcctgcgcgtatccggaaccaagatttggatttcaattggcatggtgtccacggctcagtttcttttgaccttcggactactttcctggggtgtctcgaagcttgatttcaagcaggatatgctttcatttccagcgtacagacgtcgacacccaaacacgttctttaaaccttccgccacccccacttcatttacatgccagcttcatcctcagacttggacgaacctcacactccgtgaaaaagctagaatctcgatgaacgtttatcgatttgtattcaacctgccgaatacaaaacagcctctcggcttaccatccggacaacacgttgcagtccgtgcaaaaactggaaataaagatgtcgttcgatcgtataccccaatctcagacgatcgagaaattggccacgttgaccttttgatcaaagtttatcctacgggtaccatgaccaagtatctggagagccttgaagagggagactgtgttgaattccgaggcccaaaaggcgccatgcggtataccagcgattattcagaaaaaattgtaatgatcgctggtgggactggaatcacccctatgtatcaaatcatccgtgccatctgcctaaatccgtccgatgcaactcaggtcaatcttctttatgccaacaactccgaaacagacatgcttcttcgagagcaaattgattcacttgcgtctcggtttcctcagaatttaaaggctcactacattctagtgaacccgccttctgggtggcagggtagtgtcggtttcatcacggaagatctggtcaagaagagtgtggtagcgtcatctcaaagctctcgcgtaatgctgtgtggcccacctcccatgctcgctgcggtgaagaaaattctatctgcccttgacttccacgaccccaagcctgtgtctcagatggaagatgaagtctttgtattttagactcgagatctactagcttcgagtttcccacgaaaagcatcagttccgtggatgtcaaggaaatttactactagtcgaatttgatcaaacgtttccagatacctgacttgcatacatacttcggcaatattgccgcgattggttgtttcttcgtgaagcgatgatgaagatagaaaagataaagcagaaaatgcgctcccctccatattgagtgaagtcgagatatcagatgcctacaatttatcgacagttggcgttacttaaggagtctgctcatgaataatagtaactgcatatttctttgcggtatcttggtattttgcaggaaatcgtaattgtaaagattattgtcgtttaactctcaccaacaaacgttgttcacagcaagttgaacaattggaaataaaaaagccccgcatgttgggcacccgccacattggggttgtccgccaccaatcccccgcaatccccttctattcagcttcgtttaatagcagtatttatatataacatcgcattacacaagctctaatgcttctatttggatggtactctgctcagcgaattctccggaaggatgagaatcaagcgttttcgctcgacctggggagttgatcccggccagaacctggatcactgggccaaatggttccctgaactccagaaaaagggttacagtatgtttaaggcgtatttctcgttcaacagagtgacagattgtcactgacaccatgcctacgtcctcaggcggggttgaagtaaaagttcttctgctacaccccgagatggatttcaagcgactgaggcaaatctgtgatcaattgggatttgaaattgctgtgatgtatgtgatctaagttctcaagtggataccctcgctgatatatatgaatcagagcgcaaacgtctttaccctccattcttggtccgcgcccgtcaagactgaacgcggacaaccatctgcagagatatcgagagataattagtttggtcaaccctctgaatcctgcagccattacatttcagtctggacagtaagaggctctcggctctcaaggacaatcaaaagcttattttctttctagggatgattgggatatcaaggaatcgatcaagtattttcagaggacaattgatatagacgaagagttgggggtttcagggcgcgtctaccacgagactcatcgaagtcggtcactttgtgcaccgtgggtcactcagtgtatcttacaggctgttccccggtatgctttccctgcactcagaatgacgtgaactgacctgctcatctacgctacagactgaggctcactgccgacttctcccactgggttgttgtcagtgaaagattgttagattccgccgatgacgaccgagccatggttgaagctatcatcccacatgtaagttcagggtcacgcgattaacgggaaactgacaccatcaggtgtaccatatccacacaagaattggcacaacacaagcctcccagtgtccagagcctatgcatccaagttttgagcaagagagactctcattcgaaagattatggaagagcatcctgagcaatcacttcaaaagacatggccacgacgcaaccattacatttgtaccggaatacgggtaaatcgtatttatgtctatgaagagaagacacaagccagctaattctaacacagcccattcccttatcaacccattggaagtccgaaggcctacggagaggtcgcggacgaggaaggacaacgtctgcaggctttattcgacgagtttgcggccactctggtcgctacttgaactcttagctttaagtcgcccattgcataagagataatgccatttcagcctgcaagaggtagaatatttttcgtgctagtcaatattgttggatatggtggccttaaggccgcgccctctcggtacagactagattgtcagaaaccaagatggatactatttctgtacagatgactattgttattttaattgaagatctttctgccatacaattcgaccaatacactcgcattaccacgatattccgtcttagatagctaggcagcagccctacgtaggactacttcaagtcttcatgtactatgtatataatgaaatggatagagatattcacccttttcgtcctcacgccattccaagcgatcgtatccgctctccgcagatggttggtcgagtttttactttcaaatcccttttgtgatttatggcatcttactgctaaagtggtgattcgaacgttcgctaccatcagtcctccagggttcggtgaggggctgggttaattgggatgtggcggtttgcgcgcccttggtgggacccaaagctaatctattgtggtggcatagcatctttgagctaaccctgaatcgatgttatatgccttacaaaaggtaagcaaacgagttacttccatctagggaattcccatattttgagcaaggtaaaatactacattcatgtaatcgtacccgaggcttgccctattgagctggacaccaagtaaaagccactcttgaactactccaatttatgacttgtaaggtacatgaatgggttgcagattttcattctactgtatcactttagggggtggggaattgatctgagttgtttaccccagattgtaaaatgcggggtttccccacaagaacttcttcgcgaacacacggacaactacaaaattaagttcaatctagaaccagggctgctgattgtatgtgagaggtgaattgctaccaggataatgtaaaatcatatataggcttgttgccccggtttacaccctactgtacttggacatctttgatacgtgttttcatcctaaagaatcacatcttgaacatttctatggccagtgaaaccaaaatgagcagtgacccagacgcgaatgacaacgtcgacatgatcgagcatgtccgcacgaatgccagcatcgccattcctcttgaggtttttgagaggcgataccttagcctcaatattccaaatgcaaactggtataagcgtctcggtaacccaacacctctgtgagttttggggtctctgattgttttttctcgagctcctatctgatagtgatatagcggacttgttggatttttaatggcagcgagccctttcgcatgtgctctcttgggctggggcggagcaggaggcggaggtgttgcgactatgtaagcgagaccaaagagtgaattcctgatgattatttcaatctgactggctctaacagaggattctcgtatttctttggcggcgtacttcaacttatcgcggcagttctcgagtttatcctgggaagcacttttccttccgtcgtatttggctcttttggtaagttacacggagatcatcacagaggtacttgaaaaaaattgacatgtcattatcaggggcattctgggtggctctcggcgccacacaaacccctaatttcaacgcccaggcttttttcgaaaatggtgaaaatgatgtggatatgagcgaatattacgctagctttggtaggtgttacccagtggaatggacggtaggtcgaattgaccatggctaatttactccagcatttgggctgatcttcctggctgtcctcgtttccatatacacgatttgcgcaacccgccttaacatcgtctttttttgtctttctttcaccctcaccttttctgtgatatgtcttgccgcgtcatactggtgtatggcacaggggaaggctttagctggagaacggctgacaaaggtatttgcatcccgaaagagacccgagattccttgatcttttgaacatctactaatgaaacgtccttcgcgatcaggccggaggttccttgctgttcatagtttgtttcctagcgtggtactatctggtttacttgatgctagattgtgtcaattttcctttgaatgtcccagtgggtgatctgaccagagtatatggtagagacaaggctaggaaccgtgagtgtgaggggatggattttccttgaaagaaaagtgtggatctaaaagatagacacttgtctttcttagaaaggccacttgatgaaataaccttttttggcttgaaagatacagggaaacgatcttgactgcaactgcctcatattgggaatgttgaaactagctggaaacaaagaagggagagaagtgctcttcaacgtcattcgccgttactcagaaacccaaggccggaaaatatattatagattgattcacaatatatgacttggttttttctgcttttatattttgtgtcactatctgacaattcgaatttagtatcacgggaaaaacttgcgactcactaataccgtttcactctctcacgtttgctctttctacaagatatgtgcttttcattgtatccatttcggaaatataccaggggattcaatacatggtcgaatgtacttcccgatacgaagttgcctgatggaagcagctggtggaaaattggaaaccagagatctagcaaatgagacagttttccatgattaaggaatagcggttattgtgtgacaattgagccatcttcagatctccgcaggttatggtgactgcaacagaggcactattgcaaaatctccgtcacggatcctgtaactaaaatacccaatgaggctcggacgtgaaagaacttcctagacttattatatgacttcaattattagacctatgagaggcttagaaagaataagcacattttggcccgaaactgctgctacgaagccctgatcgaggttttcagcctgagaataattaacaatattaaccagaaagattataacaaagataccaagatctgcgatttctacttgttggaagcagcaaaaagaatgatatctcaacacaaaatgttgaatcctattttcgtcaaagctcactccggaatggctccgtgtacattttaccggtgatcatcaaaacccccattagggtgaatgaggactttagtgtatccgctttccttcttgtcgaatttttcataagccatcgccgcatcagcgaaatcgatttcatgcgagatgacgaagctgggtttggccttgccggcaattatgatgtctcgcaaataccgattataggccttgacgttacactggcctgttctgagagacaaaccctatgagaaatcagtaacttggatctctcaaccaagggcaatgaccgaccttttcaaatagcttgccaaaactaaggctgattataccatttgcggaattggcgtcagatgatcctggatcgctaaagaaaggtagttgatgtgagacggtgctatcaaaatcctcctcgtggcctcttgcccatctccggattcttaccttgggacatagagcccaggaacacccattcctccacaggctcgtgtgacacgtatcatgttctcgaggacaatatttgctttttcggaggatccattggagtcgacagcctggtacccaactgcatcgactgaccggtcgaccataccattattatgactggtaatctgatcaactgcatctcccttggtaaaatcgatagggatacagcctatactttgggcgacctgaagacgctcttccacgcgatctacaacatagacttgagacgcccctcgcaagactgccgaataagcggccatcaacccaacgggccctgcaccgaaaataacaatgctttcgcctggtacaaatccagaaatttcgactccgtgccagcctagtattgtcagtccttaaacaagcttttgtgaagcagaaaacaaaaagcgaagcggggggtggggggtgggatagagctcaccggtagggaagatatctgtatttgtgtgtcagctatcgtttctcccataaatgtaaaatggccaaattacctgcaagtagtatgaaatctgcttcgtgttctttacccgggggtaacagaagggcattgaagtccgcgaaagggacacgaagatactgcgcttgaccttcatcatgacattagagttaagactcctggcctctgcgtcaatttttctgaacttacctccacgataagggcccattgcaacgtatcctgccttcgaggtcagccaagtaggtgatgtattcaattcttatattttaccgtatgcgcccccggcgaacccgggattgactccagtacaaaaggctgtttttccttcctcgcaattgcgacaccgtccatcggcaacgttgaaaggcatgacgacacgatcccctttcttcagaagcgttactcctgagcccaactcctgtacgattcccatgttctcgtggccttctaatattagcgcttcttctctactgctataccatcagatcttaccgaatgtgattcctggtttggcagcagttctgccctcatacatactggaggtgttagaattgagcagcatttcacagcatcttaggtcaactggtacacttactgcagatctgagccgcaaattgccgccttaatctctattagcgattttgatcttctgaaccaatgcgatataataactcacagacgtaattttgacaatgatgtcatctggatgttccagtcttggcttttcaacatcttggacttggacgtcgtaaggcccgacgtagttcaatgccttcatagtagtcacttgcatcgtgttggaagtagtggggccaccgtagtagaaattagatctcgaaaatgagattttaaacttcaaacaaagacatcgggcggcttttattacatcaactgaagacaatcgaggggtagaagtcaatagtccaggtggatgggcattctaactgaccccacatgggttttacgacaagaatgtatatccgtgaggggtagtcctatcaaacccaccccacccccacccccacaccaagtaaggtcatcgagttgctgtgaaatgggtactgaagcaagagctgggattatcggcttagaatgccgaaagattctggcctaggacaactattgaaggaagttggatatcgatttcggaagtcgtaatggaatgattcggtctaacattctatgccttcttccaacatcagtatgttgacgatcctacgctatccataggtgcattggacccgtcttgtagcatgtgtattatggctatattattatagattttttggggttatgacctagtattatagacacaggtctaacactaataaataaatagtgcgtattttgtacggaaagaacagctctcaccgaagctcaatcgtcaccttgccgtggaatggcaagaactagttctcttccagaagatcagcatatgccctcaagcttgcactgacaacatcgacgattccccagcatagattgccactgaagcttctcgtccagactcgaatgattgaacagctcagttgcctcatatttctcgggtcttttatcaattccagtcgattttctatagggagtttgattcccaggtcagtctcatcaagcaatcgtgtgatccatagatacagctttctctcgtgacttggcaatcttaccagtcccatattagggagggcccgaagccacgttgtcaaaagatgagcgtattcaagagcgctgagacagtgctgtacgctccagtgaaatgaataagttcttgctacgaagccaattccaagctgtatgggaatcgacaaagcatgaactgcatggagaagtgctgtgataaatccaggaccacgcacaacatcattgggtgcaccagccagggcctgtgcgattgctgaaggatccctcgtcatcaaagcacggtggggtccaagatcaatttgcagtcgcacatagatttgtcccagaagtgccgctgaagtgaatgcaatgggaccggagggattgcgtgggtcggtgctggactccggtgtctgcttccaataggacttccatgtccgaagcacggcatccattccggttatgtgatgccgatgagtcccctgctccagtggaagccgacataactgacgagcaaagaaaagttgctgggacaaggcatgtaagagaatatgatttccaaaagcagtgcaagccatttcaccaccggctgagctttctttcgccttaaagagcaaagaaatcgattcttggaaacatgaatgctttctattttgggccttttcgtacaccagtccccacgcacttgcactttgcgctgtccagacttcggctgagcagggcatattgagccccagatcagaattgagaatcaacgggggtgtgttatgcataagggagtggaggttgagaaaacagaaaacgacgaatttcgttcgcctgttagattcttctttggcccaacgacaccagtcaacatcatttgtgcgatcggtgatttcgaaggccggtttttccccaagcccatggacacggacgagcgatgcaagattaccttgcagagtcatcgattcttgtgccgccctagcatcgcctccccaggttgcatggatgaccagcagtagaattgcctgcatagcctccatcagctcggcagactcttgctcagagcgatcgggagaatgcgaccaaaatccggctaccccacggcaagtggaaagcaacgagctcgatagaaggtttggtgacgtaccataacttctttgtctcaggatctccaagattattgcttgtgctgcacaaaacaaagtcaacccttcttcgccctcaaagcggtactgtgccccacaggcagcaatggcaagcacaagcgctggattgcaacttccaatccgcagcgtcggggtatgaataaagggaaggtgctcgttgaggccatcgataaaaccatgaaaaaaccgagataatttgaactttgaaggggcagagaaatctccaggcaaaacgcactggaaatagttcagcccttttagaaaagaccgataatcagcctcgcggatattccgagtgagctgaattccgatggccccacctgacctttgggatctgtcttcttgctcgcccgattctggctgcaaggacggtagacgggacccgaaattagataagaagttctcttcggggacatgtccgtgtgatgaatgatcctctacatcatctgtagtggttgtgtcatttcgaaattccgtttgtaacgcagccacagggtcaaatggcaaaataaattgatcaattgattgaagtccatcgggtgcccacccttctgaaaagccgatactttcaatgaaatcggcaaaattttgcattggatcttcgattggtttcattattggacaaggtatcgactcctagacatactcataatcagcatgttttgtcactcttctgatatattttcagagcctgacctcatcaaaagaatcgagcctttgtacgttggaatttgcttcagtaggatgctcccaatccctttcacgtatttggagtgattgctccacccaaggcaacatgttttggctgtgaatagcagctattgagtgctcagctggaattggcataacatcaagtggggtttgtcttcgatccgccagcccctcattttgtccatgtacaagaagaggtggtggtgggtgtacaagtcttttatggcggatcatcaggtcactaaacacaattagaacctgcttggaagggcaataggcttaattgaacgaactttctgccaaacgatttcgaacatatgtcacatgagaacggcttgtcattggtgtctgtggtgtgagtgtcagcaatgattcaacctgtgttggcgaagtgaacggcatacgacttctgacgtgccgctgcaggtgttcggcgcgagaaaaagaacgctgacaatatgggcacaggggcggcttagcacggcccttcttgattctcttgggatctttttggcccggcatgacggtggattccatgatatgaagaccgcggctgagccagaagggtagggtccgagtctcaggaaacgtagttatgaggggcagtggggacaatttcgggagataatcggtaagggctgcccaggtggtgaccccgcattgaccgcctcccgaggttggttcggggccttgagaatcgtagcacgccaactgaacgtctgctccacgaagagacaggggtcagaggaacaaaaagtcgcgactatccgtaggaaagatgtaagaacttgatatcacctgccacagggcttcgaacaagatattgttcgcgaataataaatggcgttactagcaacgactggatggagacgaacagtgcatagaacattgacacatatttcatccccggtggaaatcgagcatttattcccggtcggatcaaatactgtttcaagttcagtgggccaagttacgcaggacactgcctgatcatccagcctggctggtatccacctagcgtgtaactcgctttggagaggagacatcgatactgccatcgccagtggaactaatgttctgactaacccggatttcacttctggacttggccggggtcacttcctttcgcgaactagaaattgcaaaacatttgacgatgacgccgatggaaattgccgtggcgagggtattggaatagtcatcattaagcgccttgacgacgccatcgccgacaaggaccctattctcggtgtcatcctcagcgcttccacaaacccagtcggagtctattacccggcctcactccggggcccagcgcgcaatcttcaagaaaatcttgaaccaagccgctgtggatccatatagcgttagctatgtagaaatgcatggagcttaactcacctcaacctgcattcatgaaacaatacttactatgatacagaggtactctagcgggtgatgccggtggaatgatcagtgtcttggatacttccgccccgacgctctcggaggtctccaagggccggacggaggagcaagctctctatttgggctcagcaaaggcaaacatcggccacggtggggcgtcctccggtgtctcggccctgataaaagtgcgtctgatgatacagaagatcatgattgtccctcactgtaggatcaagaccaaaaccaattccaagttcctgactgatctaggagagcgaaatgtcaatatcgctctgaagccaacggtgtgggagagaagtaccgacccttccagacctcgccgcgtcttcgtgaacaacttcagcgcggctgttggcaactcagtactcttgattgaagacgcaccagtccagaagtagctgccccttattcatattgatcccaaaactgtgtatcttatcgctgtgtcgcctaaagctggaaattctctctagggcaatctgcgctctctctttggtcacttgaggtagaaccctgaagtctctttggtaagctttcatacactactacaacccgtcggatatattataaacattgttttatacttactagctcaaatataactgatatctatacccagatcgacaatatactataggatactctgggaataacccggctaaagaatgccccgaaggtagtattcaccttaagtggccaaaggaatattcatgcattggtcgtacacttagtactatcattaaagggaaatgtataatatcaagtaggccgggtaaagttttattagtattgtattgtcccacttcggctgccgtactcaccccaagttactccgtacaacataaaattttagaaattaagcttaatgtgacgatctgccgacttatgccgactgactggtgcacctgcccaaccttgaaccgcgacctcgcacttaacattgcggtcgttcctttctaaaccgtaaatgaggtcggagtttgcatggcttatggcaaggtcgctaggaagagcacaaaacccagtcgaggagatcgtagattttctctttccctcctttatacttataatttggaattgattgtactcttttcttctggaaagaactagcatgtaacacttaaggagacacaaggacacttgatcttgatatattgtcagaatctgggattaataccagaatgaataccggcatttttcatcatagatacagatgggtcacgtggttgaccaggctagtctctcgttatcggcagggcagtcttcctctccactctagcttcttgtttcgtcaccggcaacaataccgtctaattgctcgcgctgcatgatggaatctgcgcctctggcgtacgtgccggtgtcagagcgaagcctctcccgtattgctcctcaaattcgcgagtcatctcaccttctgccataccgcctttgtctagagcggaaccctcttttgacatgggtatttcgtccctcggccgactggaatgaatagccgtaaggtctcgtgacaactgctggattgattcgttgctcatatagcctcccacttgcctgcttctccaaccaaggccccggttctttccgtgaagaacttgaccatttgcggagaccataaattggagagcatctccagtgccgtgattttcgatgatactgacgttctcctttaagtgatcatccgcccgtgagcaaatttcgaggcactgccgagtagtttcccactcgtcgcgcaaccttgatagatcttgagcatcctcgtcagaggatattgctgtccttgattttgcgactagtcgatccataatagctcgcatatgcttttccaacttgtttgccgtcatagccaagctatttttgcattcttggagaccttcatttgtgaccgttgccggtgacgcttcagatccggctgatcccagagatggacccgcatcgtcggacatcagttgaatttgatcgatatggttcgacagctgagcgcaaatctgaagacacttctccgtactcaagcgctcctctcttaacgaatgtaattcagccgcatcaggcccagactgagtcacatcgttcttagccagctcttccaacttcctatcaatactctcaagccgagctcccagatcatctttcgcatcttggatgaggctctcgtagtccccaatattttcaacagcaccagcggataagcgcctcgtaagaattagctacttgcgtaaatggaagctcagaaatgaggggggcgacgctgtaatagctcaaggtgacactcacaggtttacatcggttaaggcaatattgatagtggctttatatcccgccagcaagtcgcggaaatcgacaatgttgttacccatgtatgtcagcctggcccagtcccggaagctcgtgccggtactgtctgatcgcgatgcgcatttaagaatctcctgctggaactcttggcaaacattaccgcatcgcaatagtggcaggtctaggcacgagagatcgacactaaagttcgatttcaccaggtcgacgaggggagccagcacagcactgagggcttccagctcggcgagaaggtcgcgcacccgctttggatgcgatcggaagccgttcactgtttcatagagtgagacactacaacgaaaggcaaatgtcgccaaagcaaggaccccggaggccagcccgatcgcttcagccatattggaatgaaggacgtagagaagttttcaggggttttcaaagcttaggtggcacacttatacttatatatagaaatgagcacaatgtagcgtcaagttgtaggcgccaggtttatcttgcaatcgttgctctgaggtgagggggcggggcagcggctactcgaacagtgaggcgggcgaagcagaattacgtaatagtgactaggtgccttccatgactagttacacgttaactagttactcggttgtccaaaattagattatggattcggcccatgcagctccgtaacctgtttccacaagacctccatgacacgtcaccaagtatgccacggtgtctcggggtttcattggatttaaaggactcgctctgtgactcggactgccggctgtccttcctagacaggcgttaaatgctgtgaagctagtcctcatgtaaatataaagaaataaggcacggccagctctcagtctggcgatgtgggtccagggtcggaaagcttgcctcagccaaaagatttaggcccgttgacttcgggccaagtacccatagtaatccacataacacacaactttattcccagatcaagataatcgaagtttatcaagaaactcaataagatcgattgtgaacagcctcttttctgtgattcggtcgatgtgagacgtgggaaaatacaggatatagttagggttacctcccattaaacttgtacagtggctactttccgcctgctgcactcaggagggattcgcctttcatatatattcctgagactctgtcacagcttagtcatagttagctagttagcacccccaacaaggggttcataatatcatcatcttccccaccaagcttacttgccacatttatggtagcacgtcctggtttcatccagagttttttttcttccgagaggatctctctcgggtttgttttaacaagttcgaccacctcaggggttcccctatatgccaaggtcagaggtcaccaagcctggcacgatcggcggtcgcccacgctgtcgatcacagtgccaagccgctacggtaaggctgtcgatcacagtgccgagccgctactataacaatccatggacaagcgtactcgtcgggccacccagcttgcaatccagttcgacaattatcgccaggaggcacgcccctggtcaggtgatttcgacgcagatatactttcccgcgttatcatcatcctgaccccttcacctaccgggcccgccaatccctcaacctcgccatccacttccatcatccttccatctttagaggatccatttccaccttcctagcctatcgacaggtctatactcaataaggccgttaaggatttcctctatctaacgtcttacctcgccgttctaagtcctataacccctctatcaagtgagcctgcgtatccgctcgggagaccccgacctaagcgaactataagtaagcctcctagttcaccggcttctataccttaatcttcgacatctgtatcagactaaccgactgcctaacctactgctataatatacctttctataccctagtctttaacgcctatttcagactaaccgactgcctaagctactgctattatatactacgcgtataggcccgctactatatgatagcaacctcgttttagtccccggccaaacagttataatagtaagtttttccaaactgaggacgaaaattctgtaccataggctaaggacagccacatagaccttctataggataactaagtggaagtctagtcttcggaagactaataagccaaagtcgactaagtagaagtctagtctccggaagaccaataagccaaagtcgactaagcggaagtctaatctctagataactaataagtagaagacaactaagcggaagtctaatctctaggaaccgaataagctaaagacaaccaagcagacctccactcttataaggctagtattaagtacctaaccctagaacgacccccagtatagttaagagtacgattaactttacatttttacaatagtaaggctagccctatagtaggtctatcgagcctactataggaagctaaactctctaatctcctataaaaaatagtaaataacggaggtctaggtcctagctataataatagaaattagggtcccggctatataggcgatatattaactctagctacttccctactattacctagtttcgatatagtatagtttatagagcttatcgagaaagctatacagataagccttcggaataatactaatactctttataggccttaaggtaactaaggtccctagggcgagtaaggttccctaggctaattagttactaccgataccttatagaaagtatctaaaattggtgtttttaatcctttaaagagttttaaggatagaatagatatagtttaaaatctttatatctactccgatatatatacgtttatagattatataatagacctaatactcctaaagttagaagctattatctaagcgaatatctatagctacctataaggtaatgcgctccgatagtattcgtaggagttaactatagataaaaaacgccttataaactaggttctactctaagatagatggttttctataatatcgcagcgttttagacctaattataccgaggcccttctctagcttaataagtatatatataaataggataatgtatactaaggctgtaccctaagagaatatatatagggtatattatacctatataaagctataggtataatagatattcttaactagttattataaattcgctagaacctagagcctatactttattacaatatcctagagctaactaagactaccttattagttacttttataaatagccttaactactactattaagactagaaagatatagtaattaagtgctagagttagttaactactaggtttagaaataataggccacaataggataatttagccctatattactaataagactagcgctaaggctacccttagcgcctatatagctataaccgcttactagcctaagactattaaggtctaccttaaagctaggccagatatagataataataggctctagcgccctatagctaggcttagtagactccttagtacctatactaagctataggagcctaatattagtcctattagtattagccctagaacctagtataaagtaactaaggcctctaaaccttttagagataataatatttatagtagggagtttaagcttagtagacctagaataatcctagctactaatagtctagctgtaatagctctaggaactcctagtatactatttagaataaaccttagtagatatactatatagatatagatactaactattattagttaaataactacttctaagctaataacaatagcctaaaggaatattaggataatgtcctagttaataacgataattaataggatttcgaagacaacttttacactaataaggacctatatagtataaatttcgctaaccctactagcctataggataataactactaatctagtttttaagcctaggccaatctaccggtataggcctagttatatatagtcgatagtaagtactcagttacttatttatcctatttataggtttttaagttaaatactaagctgtattagtatcttaacggctgtaagccttaaactactaccgctatactagctaaagctatcgctaatttcgcaaatcctgcttattatattatctactcagctagatagaccgactatatccctagctatatatttcgatcctagtaatatataatagctatagttagacttagaagccctagtaagctaaatacttattaccttaactctagatatattataactttaatcgatttaaagctagcagtattactctaatacccctagtatcctattagcctaattcctataagtaggatcggttcctaatacctatctaaccgctatattattatttaagtttacttcctaaataaagatatagccgcagagctataaatcgaggcctatattatcgaagacctctatacctagcttcttattaatatagatattctaggactagaggggtttatactcaatttcctatattcctaaataattattaagtcctataaaaacctgacttttcctattaccctttatataaaactatactatataagtaaaagaccggtctatatttcttctaaaattgaggtccccctacgctaggcggcacagatccctattattataaagtcgattttactaaaggattataactttatttttaagctaggtaatagtaagtttaagattctagtatagatagttaacactggttttatatatatatatactgttaataataccgaccgaatataagtcattaggaagaaggattgtataggctaacttttagagctagactttatatctacctactaggtttctactaaggtaatacctctagtattatagccctaagcggttaagtcctaccccctattaattaattaagatatttataactctattactgtctacctagctactattaataacttaccccagctactagatagacttcctaatagacttcctaatactatttttatactagatatatagaaagtcctactaatatctatagcctatacttagctaagatatctactagaaatagtactacctaatagtattataatctataggatacctaaaatagctgtagtactctgcaatatttataagtaatataatatttagtctaaccctagcgttatagatatcctataagataaatagataagactcctaatagtccctagtttaaagctgtaatatttataagtctatagataggtaagagaaagctaataagttatcgataatatatttaatactctatatacttaaggaaagatattatttactaaatactaagcctaaggtataaaccctatttttattatatagaaataggttacttatatagataataagggtaacgctaagctctaataggttagttatattatagtcgataaccgcctaataaataaaaacttagttctagacctatacctattactacgataagacgagattattactttagtaaaaggtaagtattttattataattatagatatagtaaaattcttctattaatagtatatctatcccgactattatagctactaagctattatattataccgcggttaagaaattctctatattattactataggtaatttaaactctattgcctatatataatactagatagataatatattccgtatattttaagaatagtattaaacctatatcgataatatctttgtggttagtaatatacttaataagtatattactaaactctacctactatttataaaactagaggaatttaatattactctaaacctaaagaaagtatatattaggtttctaagtttaaccctattaggtaaggatattaactccacaggtatattaataaccgctaagaaggtaaaggtaataaccttactagtttttctatatatatataagtaactagaaatataccttaaaataataggtaatcttcgctattatattaaaagctatatatagaaatcggaactactctaagtctataagataaacttactaaaagagagcctaattaaaggcccctagcgctaagtatagagtatataagctattcttaataaaccctcctaggctaagcttaagagtttttatctactctaggctaagttttataaacctaaatagctagtatactataatcctatatactagctctatattaataccaatagtttaaaggaaatagggcacagtactataatctattatataaagataacatttacttataaggatgttttaaagctaccccctattatagagatctagccgattatattccttagccgacttcttatagatatagagaagaattattagcctactaagcttaaggtttctaccctctactagaccctctataaggtatatcacttagtagagacctatcctagcgaccttctagctatagtatatactaactatagtagtattataggtattactaaagtaataaacttaagttctatttctttagaatactaaaatcttcgcctagtctatatatcctagtttatttaatagttttacctatatatcttctatagactaggaaaaactaataagatcgctaacactctttcctatctactatatatagacctattagtccctagtatataagataatcttaaggatatcctagcactattcctataagtaggatcggttcctaatacctatctaaccgctatattattatttaagtttacttcctaaataaagatatagccgcagagctataaatcgaggcctatattatcgaagacctctatacctagcttcttattaatatagatattctaggactagaggggtttatactcaatttcctatattcctaaataattattaagtcctataaaaacctgacttttcctattaccctttatataaaactatactatataagtaaaagaccggtctatatttcttctaaaattgaggtccccctacgctaggcggcacagatccctattattataaagtcgattttactaaaggattataactttatttttaagctaggtaatagtaagtttaagattctagtatagatagttaacgctggttttgtatatatatatactgttaataataccgaccgaatataagttattaggaagaaggattgtataggccaacttttagagctagactttatatctacctactaagtttctactgaagtgatacctctggtatcgtagccctaagcggtcgagctctgcctcctattgattaatcgagatgtttataactctattactacctatctagctgctattaataacttatcctagttactagatagacttcctaatagacttcctaatactatttttatactggatatatagaaggtcctgctaatatctatagtctatacttagctgggatatctattagaaatagtactacctaatagtattataatctataggacgcctaaaatagctgtagtattccgcgatatttgtaagtaatataacatttggtctaaccccggcgttatagatatcctataagacgaatagataagactcctaatagtccctagtttaaagctatagtatttataagtctatagataggtaagagaaagctaataagttattaacgatatattcgatactctatatacttaaggaaagatatcgtttactaaatactaagcctagggtataaaccctatttttattatatagaaatgggtcacttatacagacgataagggtaacgctaagctctaataggtcggtcgcgctatagttaataaccgcccgataaataagaacttagttctagacctatacctattactacgataagacgagattattactttagtaaaaggtaagtattttattataattatagatatagtaaaattcttctattaatagtatatctatcccgactattatagctactaagctattatattataccgcggttaagaaattctctatattattactataggtaatttaaactctattgcctatatataatactagatagataatatattccgtatattttaagaatagtattaaacctatatcgataatatctttgtggttagtaatatacttaataagtatattactaaactctacctactatttataaaactagaggaatttaatattactctaaacctaaagaaagtatatattaggtttctaagtttaaccctattaggtaaggatattaactccacaggtatattaataaccgctaagaaggtaaaggtaataaccttactagtttttctatatatatataagtaactagaaatataccttaaaataataggtaatcttcgctattatattaaaagctatatatagaaatcggaactactctaagtctataagataaacttactaaaagggagcctaattaaaggcccctagcgctaagtatagagtatataagctattcttaataaaccctcctaggctaagcttaagagtttttatctactctaggctaagttttataaacctaaatagctagtatactataatcctatatactagctctatattaataccaatagtttaaaggaaatagggcacagtactataatctattatataaagataacatttacttataaggatgttttaaagctaccccctattatagagatttagccgattatattccttagccgacttcttatagatatagagaagaattactagcctactaagctcaaggtttctaccctctgctagaccctctgtaaggtatactacttagtagaggcctattttagcgaccttccggctatagtatataccgactatagtagtactataggtattactaaaacgataaacttaagttctatttctttagaatactaaaatctttacctagtctatatatcctagtttatctaatagtttcgcctatatatcttctatagactaggaaaaactaataagatcgctaacgctctttcctacctactatatatagacccgtcagttcctagtatataagataatctcgaggatatcctagcgctatatatatttaaataacctatagtagactaacctatagtatacctccttatagtatcggtactctagctaagcgacaatactaaggattgtatcttataaggataccagttagatactcactagttagccctaatcgatactctagaaagtattaacgcctagtaggatccctaagttaagaagttaccctactacctagagaatagcttgattattttcacaaattctaatagcgaggagagtctatatctaccccaatctataacttaggaaattttcaacttagtttataataagtagatatactagggtttcgacagagcttagtataagcttcgtggtatcatattctacaaaggtgctaagctcctaaagcagtacattaaacattgccctatctatttagagcataggatccgccgttatcgcccatacggttctctctaactaatcatcgccctaccgatacccttttatactatttgttagagggcggtaaaactaggcacaatgcttcgtcttatgctctcgaggggtcaaatgcttagtnnnnnnnnnnnnnnnnnnnatataatatagatagggtatcctaactagtaatagtattattaactagtcgtctattattaattaagagcgatcctatgattatatagaatagggcttaagccctattatctattatcttaaattgtttatagtcgattttatattcttatcttaattcttactagagagttagttaatagttatttagattaactattgctttaccctaggtaaaagtcttagcaaagataggataaataggtttatttagtattagaagggttattatttcttctaggttaacgtattcctatagtctatagctaatagcaattaatctgatatatatatactagactaactaattagattactaacttaagataattataggtttcgcttctgttatagtagcaaaatcggatagaagagagattagatgaaacaaagatcagatgaaaagtcgtcaatattggtcttaactctcagataaaagggttaggccgggcttataactgttggagggcggtaaaactaggcacaatgctttgtcttatactctcgaggggtcaaatgcttagtgtttaaatagataaacaactaggcggtcaaaaacatgagatcaaagtgtatatttaggtctaaaatagtcaatttgtctgatctggtattctatacaatctggggctttcttatacaaacattgcggatagctcggtaagtactgagatcagattgatcttataactaactagatgatttcatgatttttcgatcagatgaaatcatgactttcatcagatgaattcatgactttcatcagatgatttcatgactttgatcagatgaaatgaaataggataaatagtgcaaagtaagcaaacaatcgaatgaagaacacatattccaacactattactttagatctaatcgtcgcaatgcctatttcgactaatagatataacgcggctataactataactgataagtttactaagttaataggaatgatacctggctgcgtagactaggacggtaaagattaggcactgggtgctctctctttctggtagatagctaattaggggattcctacagtgattattagtgatcgcgaccctaagtttatatagggcctctagaaagcacttttcgaccttatctatactaagttgttttttactactgcctattacctataaactaatagtcagttagaacgtactaactagatagccgaagttactatatagtacgcaatcgctacttaccctaacgaagattagctaaacctattacctgccctctaagctatactaaatagctcagttagtataacaataggttacttaccttataaactcttatatagtatcgaactacactacccttagtcgcttttacactaagctatagctcctaatattattatatatatagataccgagtattctactacttaggctactatatatataaaacgctaatataaccgctattataggtagattttttttaatatcggtaataaagtctatcttaagctaggatatagatataatatactattaaactaagttttactaaggtaactacaatagcgttatatcaggtatttcgaagtactcgaatatattaggaaacttacttatcgtttaaatatcctaactaagttaagaatctacctagttattagtattatatacctagaacccgtcctagatagtaacaatccctaggagcgctaactagataataaatactacctaactatagataagcgtttccctaaagatattatctataaggtcgactatattcttactaagtatattattaatatacctagttaaccctattataatagtactaggtattaaatcactaagtatctaatctactagaaaggctaatcagctagggataactattaggtataggaagaggactgtattagatataataaggctattaaagactttaaggaacattagggcgtactcctagtaagctcctaagtactatattttccttactttatttttactttccttttacttttattactatctattcttactaccttatattacttaactcttacttctaactcctacttttattctaatttaagtttctaactcttatttaactcttacttactactcgatatacctattctatttttcctacctctattacttctttttttatattaaccattctctttcttatatactagacttattataccgaaaagaaaggcactcctataccttagtctattatagggagcgactgatatactttaccttctgggatatatattcaacaattcctatataatataatcttataataccgcttatactaaactagaactagataggctaatctagactagtaactaggtcccagttattataggtagtagactatctctataagatatcgcttagttacccttatatataagatacaagtataatctaaaaggaaggctagtactacctaataaccgtaacattctatctagaatatatattcaacaattcctatataatataatcttataataccgcttatactaaactagaactagataggctaatctagactagtaactaggtcccagttattataggtagtagactatctctataagatatcgcttagttacccttatatataagatataagtataatctaaaaggaaggctagtactacctaataaccgtaacattctactaagtaataagcttatttatatagtaataaaagaactgtcttagaagaagtatactaagttctatactatctaggatactaatagtaaactatatactagtagaatactatagaaccctagcctataaattaacttctatagactcttatatatactaatctagaaacgttactatatattcgttagcctttatatagccgcaaaatatagctacctaatagtcctaaaggtagatttaaagcttaaaatcgaaaacctagtttttacaattagacctattatcctaggttatcctttcgcagaggatatagttactaacctagtagcagtattctaagcctactatactaaagaataagccgaatttctatactcccgttctatggtatactaattatataactactacagtcagtatactatactctagaaagctgaaataaacttaaagatactagatatcggcttagataattaccactatatcgctatactcctataaggactaagaccctcctatagttttttctaggaattctctatatagtctcctttatacttagctaaagtactatcttttactttctcctaaatagacctaaaaaagataaagattatagacccagtttaatacttatactagaatataaattatctaacttagtctagtcatagtacttagtaagaatactagcccactatataggactaacctagcgacataattagcgttagctcttccgttccgttctctttaccggatattcctaaaccttaaagctaattaccagctatataaagccaactgtactaagctaatactaaggaaaagatcctccgcaatttcatccttccctataaaggtataatagagtatatagactaggtacagccagagatcgagaatttaaaaaggttacgcaaacatatagctagatattactagctacaactctaagaggccgctctaaccgagaaaaccaaggctgttactactagtacccttataataatctcgaacacacttagtagcttcccggatattcagtactaagctatcaggcgctaggaaaacctcttctactgcccctactaacttcaacaaagcgctactcctgacgaccaagcctaaccagagagcccgatactgctagacaataaagaacgtaaagcggctaccgagggtccaccgtacgaccccaggcgtgaattcacaccctcggacatctacactccgccccgggcctgcgataactgacggcgcttttcgttttctcatcattttttcttttttattcttattttttattgaaatttccttttttctcagccggaggccgagattttttgagacccggcatattgttacagcttagtcatagttagctagttagcacccctaacaaggggttcataatatcatcatcttccccaccaagcttacttgccacagactccgagagaaaaagcccttagaatgcgctttcaagtgactagttttgacaagaccgaagaaaccatgactaggatggcaggcggaactctattactcctaagacacccagataacgaccggtacataactcccgggggtggaatggaactggaataaatcgagagaaacataatcaaactcctaacactagaacaacatgttaggcatttccagcctactgacccttagggggaatcatagcaaagttctggtctccgtttccctcaaagtagtgtccatctgaaatcctttgcgagccattagcgtatacgttatattgtcgaccatttctgccatattgagaagcatcgcgaggtttgtcggctggtggttgcttggagtgatgtctctggttcatttccaggtctctattccaccgacgtagctctccacttacagccacaaacccaggatcttcaacaccgacaaacttcggcatatccatatggtttctatgtataccaatgaagatttgaccgggcaagatggccgaatattgtggcacgacctatttcttaggtgtcagcaatgaaaatggagcctgaatattttgtctagcttacaaaaccaacacctagcacgggtaactcttcgtaaaagcaagtgacctcaatcggtggtgtttctgctgtgctgtgtgccttgatcatcgtgtgaaagccatcttggatccgcgcaagaacctcagaatcgcgcttgaggacatccacaattttggaattcgtctgcttaaggaggccaatggaccgagacacgacctcagccaatttggcaaatgaagccccatggtgtggcgttccaaggaagatgataccacgggtacaatcgaggatgttgtggagatgtggttccggtcgttgcctcgactgaaacaaggcctaccatttgcattagtatcatttcgtcagtgtcttccactcatgtaatgcgatatcgtacatctttgcagactagtccacccaagctatggcagacaaaaatgacaggtcgttcattctatttgtatcaacaatcagcagtactagtggatcctagaattggttgtcttaccgtgtcgctgctatctcgatacgatgaaagagatgtcagcagattcagggcatgattgcagatgaagttctctgagactgggcctcgccaatcgaccaaaaacgcgtcataaccgaatgtgaggacacgagctgttgggagtatggatggcaagagactttcgggccagggtgtagttgcaccttcggcagtccatgtagcttcacgatcaccagtcaagccatgaataaacacgatgctatgagaacattagaaaggtttccacaacgaataaggcacgcactcaattgtcccatcatctgggttacagagcgttttgattccgttggggaaggacttcttcggctgaatctcaggagtagaattaggagctgaacccggttgtcgtcgcccaaaaattcgcttggccctagtatagttgaaaaatgtcatcttagatcgttatagaaaggattcctggtcgtgcggtttgcgatataagactgaaaggatggcggtgcatcggcgagattgcattatagggccaattttcattccaacctaatggcatctgctagtgtattgcggtcaatctaagcgccaggaatatctattttcgcctgaaactcacgacgtgggtcctttcttatctcgtcacatcgtgaagacatggtgtgcttatatttgctctcaattactgctggggagatggagacaggctgtaagaaatcagaaagccaccgcagctcgtcgatcctctcccccaggacaaacgtaatactatcaaagatgtactcctgtctgcccagaatgttggatcaggctacagaagcacggagcgggttagaatgagccacagcttagtggctttcaaatccgatttggcgccgctagtgatgaaacgcatttgatgccatcattgcccagcggttacaggatagcgttgaatggttctgctcaggcgcatgttttgcaggtatttgatccaactttagattcaaatccggctgagaaaaatggagtttctttacatgattggattcgcttattatcccccaacgtgctaggcagggtaaatcagagattgtgtcgcactgggggctggatacgatttctataattagcaacatgcatggctgggggtttggagtgtactcgcgctacgacctgcatcaaagaaaatctaatctgctttgtcgatccgatttgtcaatccattcagaattgttccaccctcgtacttgtcttcatatccgatccatcaactgtgatccaggcccagattcgttgtcacattagccgcccagaaaaggggctgtgccgacgtatcagaattgaaaaaaagcattcataatatggtgccaagtgccagccagtcaaccatatggaagtgtctatcaaaataccttcatgattggcgttataaggaagctagcactgtacgtacgcgccggggtcgacggattaggttattgtgttgcgtcgtcgtcatttcccgcaggtgggggccgcacggaccatgattctgccactgcacaccgtggacccagggaatcataaattcagcgcggtgaccactgttttaatcctagacaaagaaatctacactctctggcgggttgggtgaatgctcttctcaataacagaccgccagctctacgcccagcgctttgccttgcctttgacgaagaatcacaatcagtgaagcaaaaggattcggcgcatcagcaatgtaagaattaaatacttctgattctttaaacttccataataaccattcacctagtatcttggtcagaatgtcagatattgagatcattcgccaaattactgacctcattggggtcacagaaagtataatggtggcattcggctctatcaaagacctctctagcttaccggaggcctttcaggaagccatgagatggcttcctcttgttgaaaacaccttgcgacatgccaaacgcgcggcggagaaattgaactctaccgaagatgcccgggcactgaagaccgtcctgcatgattgcgacaagaaagccgataatatactggagatttttgagcaacttggtgaaaagtcaaacggagaatacaactcgtccgtgtaccgctgtatagttatcaagcagggaaaacagcgtgtggagactttgatggacggcattctggaggacctaggaaccttggttactcacaaggcgtttctaggagaaatgcacaatcaaatcaaccttttggcgaaggctcgcgaatatctggcgggaatttgtccctcgctggccgattcggatcttgccgatcagcccagggctgccaaccaatacggcgagaacagtcgccagtacaacttgttcggtgaaggcacacagagaattgctgatggccactatttcgaggcgaaggggaatcaaaattttggtatatttccttccaaggagtctgtggagaccagatagcggttatactgggcggcggtgtcggtgtttcttgaggtgtgagatatcctacaatataatgttcgcccggttaatgaacaatattaaacttatgttccttaagtacggaggcctatggccgccatgggtgacttgtttactattggtcaatattacctggcaggaatatagtcatacactcaacttgcttcttctttctctccatcttagttattttgaatagaatgcactctgcttcctttgcaagatctggcacgtcaaaataacaacttttttttatatacttacgtttttatcccggacgacttcacttttacacgcagagcgtcgcgaaattacaaccgagatttgactggacctcataattatcccgaagacagcaattagtaagtaagtatttacccaggtatccaatttgctctggaaaaacattggcacattcaagatagctgagaatagtaaaatccttaaatgcatcaagatagatattaaaaacaaaggaaacacgttcaaaccccctccccgtcaggcacgaaatcgagttagatcattcttccttcaattgtctggattgagctctcgtacaatgatctgggcccgttcgaggatgtccttcgtcctctcgaatcgggattcgagcgcatttgctacggcgggcgccttttctgcctctgaaagttggccttcatccgcaatgacagcgttgaaatccctcgccatactctctacctcctcagtcacttttgtctgcagatcatcgaaacaagcgtcaagagctcctatgtattctctgcctgcgagtctagagatattggcaaagagcatcgaatgcgtcaagtggtcattcataattttcttccggcgcttctcgcttccagtccctatgtagatcaataaactggttgagcttggaaataaaaattactgagttgacaaacctccttcttgattgatcctggcatatgcaggctgcatcagacctgaaatatacgagctggcatggccataaatagtgtctcgctttatgtttctagaattgtagttagaattttggctgggtatagccatattgggacatacatactctgcacattgtatgaccttgagcaaagtattcgaaatatgatgtccgatgcactgttgtctgaacttcatgctttgttgaaggttggcaagggcgcatggtgcaagctgaatatgggctgcagaatttagttacatgagcatgctggtgcaacacggagatctggggaaatacagtctttatcccacataggaatgacatacctccaaattgcaggcaccatttatcgaaaatagtgtcagtatatctcgcaaggcttccttcctggaggtgcagcgaagtctgaatattctcccatttgagagttagctgctcccgtgaaggctggagtaagtcgtcattccaacatcgaccattaggtacagctccggtcgtatggtctccgtaatgactacaaaaggctgaataagtgctatgggaccactgggaataaattaggataagttgtgtagtgagaaaatcttggacaaaaactcactcctgcccattctagactgatctgaatactttcagccgtccagcgactttgatattgccctgcgcatttcttagaaccgtaaattaagttactgtatgaatcaactcacgaattatgttggtgatgcattcgtcataaagaccaatcaagctgcggcgcgtaatttgagccagtccctggtcggaaatgagttcctatcgaccatcagaaattccacacatgctaagagcattctcagagacccaatatgcccttttggatcaaaaatacccgatgaaaactattctgtgcattttccagaacccgtcgaaggagggcagcgtttccacctgtgactggatctactccagacaatgcccattggcgcagagaggaaagcaaagctggcacttcgtgattcaaaaatgcggatgttgaccgcattagagctgcagcgggcactaattggcagtagcgacgcagctcccggattcctgcgagatcaacgtatgcctcctcatcactctttccgctaaagcggtattcggagtagagtatgttactgacacaaaacacttcgacatcttggtgcctctggatgagctcatgtgatattagagagtttcgccgattgatgaggaattgactcatgctgcccaatgagttagtatgcagatactgacgcgaatgtcagatgtcagatgtatgttacttacttgaacttcagcactttttcctggcccctactacacattcagcgagtgaggttgtttcatcttgaggcagtgaccttaccgaagctccattgctttgaccgccagttccgatcgtctcgcaggagaggctttccgtgccttggactcggttgattcaagctttttccggaggacctgcatttccttattcatctctttcactcgatgagcatatggagtatctccgcgagaagactcctcaggtgaaatatcctaaaaatacaggtcagtgagcacctcccgctccgacgggccgctgtcattacctctgactttgtgcagatgatcctccgcggctgatcatctctacatcttcgcataatgtcttgaaccgacgcgtttgtacaagcacgggaaatatccataacaacaaagacctcgtcacagctatgagaaagatagcgctctgtggctcgaaccctggcaaaattcagatcgctgaaacctggtagaaattagtctgcgacccaattccattggaaatgacaaaatgagattcagtacataccaggtagatcagctagcaccaagccgtttctcaaaataggtgatttgagatataccctgcaggagtattagtaaaacaacctggttctcgggaagtcccacgaaccttatcaacttgatgaatggccaaattgcaggattaccattaccagcattactggccgttagcatatcaagaatgtccctgcactcctcaatatcaccggcaactacagaatactcaagtgcatccagtccgccaggtcgcagtgctaagctggcagaggcccatcgttccaactgtgaaagaagaactaaataggcatcttcgaagtcttgagaaagatgctccatagttaatcctggttgcttgttgaacaaggactgaaaagttccccaggctctcccggcctgatctcgacatttttgctgctcttcttgtgacttcagttcttggaagaatcgagtgacatggaattgacggaagatcgtaagaagctctcctaatagccctttcatttcttctgaagtcatgaaatctgcttcgatcgtaaaaggtccggtgtggttttcatcaacatgtcggaattcagtcacaacacaggtgcaagctgtgccttcgcggctctatacatgcattttagtaaaacctcgttaattagcgaagatgccaatgattaagacagaacatactgagcgtgacaagctctcttgatcaagtaaagagtttatcagtgagcttttcccttttcgagtgttaggactagaagtgacagaagacaaaagataacgacgaaaacccataccaacaccagagtcgccgatgaaacccacggtccgagtttccggatattcaaacatgctcattttcttagtccgcttgtacaggacatgtagatcggaagaatgatcttggtttagctcggagagtcccatgatatcagcgagcgcagccaattcacacttaacttctttcagaccatcctggacccgacgagaataaattggggcagtaggaagtggctcttcgcgaacaccagcagacttggcctcggtcatttcttcaacgtcactacagtgatcactgtctgattcttcatcatcttgtacccgatcgctttcggtgggtggagcggcctggccagtactcgaggtagggaaagccccagggatccgtggggttgctcgggttgaacttgaagatatcgaggaagtcttctcgtgctgttgactgccattaattgtacgtacaagctcaggccttggactcggacttggagaagcattatgctgctgtgcataattggaatgcgagctacccggccttagccaagcatttgatgaccaagttggaggggaatgcatgggggctagggaatcgttgagacccaagttcccaaagataggaaccaatctcggagtttgtggagttaatgcaggaccccccgagcgattggtgtctcgagatgatgaaggggtgaaagctacttcagattgcgaatgaactgagaaggtgaactctgaagatggcacttccgtcatggtgtgtctgcgttttgacagttatcgaaaagcctgggtcaggggcggatggggtatatataaggagatcaatatggcctggtatggtaatcaatcccgaacctataacaaatccgctgtgggcctttgtatcgcgccttcatgctcctacttgcgctatattagcgctgcgtttcaaccacctttttagcgcctgcaagccactatggctgctcgtctagaattttgatgattctattctgactccagagaactatggctttgtccacagcttcgtgcatggtacgtgttatccacaaccttttgcgtgatacgttttatcttgaatgttgaatgagcagagaactgttgcaacttctagccccgaacgtccttttggcccccattagttagcgggcttagctgcattccaacccctgtaccaaaaaacgcacggagtcatgcgcaggaggcgagcatccaattagatttggagtccagaaaatttcgtccttttgttatcaagggcgttgcaaccctttcgaaaagcggcaaccacggagcactagcacactcacccatttctcacccgggcgacgcccaccggactatgaccgcatataagccacacgccggtgagttagtagctgagtgggtgaccaccagcgaaccagcgaatcctcaatattgtatattttttgacttctatttttattgttcggatcttaggaaaagatctcgtgccgccgactcttcacccccttcagcctattcacctgaatgctctgaacaccactattcaagacctggatatcctacacgctgggatgttgatgtttacaatgttcgccaaagtggccagctatacaaacaggctgtctgtattacactaatagctcagggggagctaaagatgatgtattaatactaactccggcagtgccttggggccgctgccatagagctgcatgataaggatgactcaaggtcatcaagtagtacggagatactataagaaaaaaaaaaaaacagtatgtgaagtctcaaagtgggagatttcttcagttctttgatctggatttatcttacggtcttagtacccctctcctaaaattttgagaaactctactagagcttaacaggcactaatcattatatggagacacagtgagttggtgacataccaccaaattcgattttaccgttgccattgttgtcgaatgcctggatatgctccgcagcctcctcgtcattcatttcaatgccttgctgcctagaagtgtcgataagctcgtctgtggtaatgaagacttaaacttgagcaccttggcaaaaggctatcagtgagagacgcacggtcattattgacatactagagtgcagaaagtaagcatcggcgcgcataatatctattgggaaggcctgtaagcagaataggcaaagaagaggatgctttctgttctattccgctggaactcccccccttaggcatgtaattgatagatataatcgcaaattcttcgagctccgacaaatatatattgatcagatctcacatacaatcaaatatttacattcatacaatatcatttggggggatgcgaaggcagctaatctactcgttgatgccaatgaagatatatacctgattgattttgggaggttatactgaaggttgggttgagaaggagaagtctaagtcgaccaagggagatctctagggacctgaaaatatcaggcggtacctttttagatgaatattacataactactatcgttccgtgctcatactatctactgttagttattacactttcttatccaggctaaggcagcctgctaagacgacttcctttactttatttatacattgatctgtgattagtttgcaatgcttgatgctctataaattcactatgtttgtatcttgattctgtatacgttgcctacttaatgccagaggcataatcctggtcagcctgaggtaatccgatcatatcgccctacgaaggtgtaaccgctatttttcatcgatcttaggcgttaaggccctccaaacatacgagtctccagcatttgaagccactcacactcgccacagtcctgtactttcccggagaaaagctgaccaaggcccaaaacgtttgaaaagccaagcctggatttcaacataaagcccccattcctaccgactgtatgaacttcaaacaaactctccgtatcctctggctccagcgtggggagatgggaatagtgacagcctcatctcttcaatgcgtacttgcgaaagatagcattgagcggtgtcgaaggcggtctaaaactagtaagagctagtcctaattaggctgtaaagccattaaaatcaggcaccggactgttgtcggagaacgcagggtcggcataccagagaataccggaggatctattaatcctaaaaatgtatcattttcccggacgtttgttatttttagagagttagagaatttattgacatttttctgccacatatacaattgccttaccactcgaatttccatcagatgcttatacttaaaattccagtaccgcctgtctagatcgggtactactcagaattctaccacatttctactatactttattctatataaaaagacatatattttaattagaaaaaaatcatatctaacttgattcctagaacagtagagtaaagtaggtactcaaccaagttttagaggtagtgctggaatttcaaggataagcatccgataaaggcaacaatttcctgaatttaaattcatatttatagattagatgatctctgaatagctttatacttcggtatacagtacaatgattgataattctatattatacttcgtatggttgtcaaattaaattaaaagggaaaactaaggcggtggtaaaagcggtaacccgattaggctggttgtcgtgatggtcccaaaaagccctcgtacccttccttttcctcaacattgaacttcattttccccacttgtcactgcacgcagcaccagcgccactggcaccactgctcgtactgtttcctaatggcggctaccgaaaagtctggtatcagccttatgagccaatacaatattgttctaccgaaaaggcaggcgtatgactcttccggcaaacctatacctacatgcgatccagatcaatgtgctgcggcaataaagggggaggatctccccgtcgatctaagctcgttttggcatcaaagagcagttatccgtgggattcgtgattcacttcaatttgcaacaagcccggcaattcttgagctatgctccggtgacgatggtcaggcccatcaattttctcgtgcccgtaatgctcgcctgataatgagtgatgtaatccccgatatgcaaaatcctgccactcagccgtactgtatctggtatcccgaccttgcatcagaagaaacatatcgcgaagttgcccgtcggtatccgtctatgcggtatcaagtgggccgagcgtgtgctgcagcatgctatatagatctctacaaagaattggactttttgcctgacgtttctattgcggaagaatcccgcgaagttgataaagacgccgaaatctataagattattatatccgccccccaacgatatgctgttatggaagatttctctcgatccgttcatcttgaaaccccacgaacgtctgcgtctctgaatggcgatatgaagccccgatgggctttaggacagcgagttctccctggtaaaaatttaccagagacgactgctgatgatattgacatcgaggaagatggatttatcggctttcaagctatcagcttgaaggatatcagcggaatggaggtcttcgctgaactgggcccaggccagtccgatcaactgtggatgcctcttccgcctgatctcccaaatcttgaaaagcgccttcagacacagatggccgcgtgggagggcaatgtggatcgatacagtcgactaatgcacccacgtaggctgagaaccaaacttgaatataattgtattcttcgtggcatttatcacagtacaaccttcgccagatggtgggcctatcagctagaaacaaaccctggacgggctatcctcccaggtaaattgctcagccaaggcaatgaacgggagtgcagagagatacgcaccgcgattaatgcccgcgtgataatgaacaatgatatctctggtatcgacgatgactcggactgtctcccgtgggtcatatgggggcccgtaaagccctctgagaacactttagctgatctggttcgaaagtgtccgtccatgggacatcaagttgcgatcacttgtataatgtgtgattacggttcgatattccgaagtttgaagcccccctataccagatccttgtatgtggctgctaggcgaagtgaaaatccattctacctacaataccttgaggaaatcataaaggagcgcgacataactcccccggactttcattacttcaaggactttgatcacactgcaccaggcttacagactgatctggagcctagagatgatctcactagtcccactatcagctaccatgatatggagatcgggtatgggcaatatccctgtggaaatgaacacgaagaaacccgaggtacatatggaggcgggctagcaaatccgggaacggtggagagatacatgtggctctcaactgaaactgcacagaagttgaaagatgaacttgacgtgccctacccaggtgcggatattggtcatttgtatgacgatgaagaacttcgatccaagctttcacgccgtatacagcctatggatcggtagtatgcaggttttgatatgtcgaatacagtcagtccctttgattttcgagtattatctgccgagtattcgctagcttagttaccgatggcaatatcgctcgtagatactaggaccaacctttataatctcagatcagttccaatccctcttccacgtataatatagcgcgtcgagcacttgtggtataatagcagttctgtaaatacactctagcagcactggcacattgtgacaattcttatgcaggtaaataaaagctctctaagaaacttgcaggtttctcgaacttgaatgaattaccagtactgcgccgagcctgacgaagcaacgggggtgtgaatactcatgaaacaccactgtacgtgttccagggtcaaccgataacccaatcatatcacggtcctcgttacctgagcgggtcagtgcggccgtcgcgcgacctagggtaaatctcaccctgatctcacgcagcttctcaccctgtttatagtgcactcactctgtttatagtgcactcaccctgctcacccccggtcgagcgaccgtaaagcggcgctcacccatttatcacctgggcgacacccacccgaatatcgactgcgaataagccacacgccggtgagttagtagttgggtgggtgaccaccagcgaatcctcactgttgtatgtttatgtttttgtgttgttcattggcctgaacgtcgagttgcctagtatatgtgagattgagcagccgagaaatggttttctgtctactattccacggttagattttgatgttgagaggtccacattagcgggatagttccgcacgacgttatcaatcaaagggctggacacctacctgatggacactactacacctgaacaactcaacactccgaagttacctacatcgaaatttgcacccaattgctcaattgtattgaagtcccatcggccatgacagcccaaaccccaatccacgagcccgcaactgctgacggctggcatggcgtcatcccgagcgaggaattccccgccgagaaaggccgctaccacctctatatcggcctcttttgtcccttcgcccatcgtgtaaatttcgtccgccatctgaaaggcttgaccgaattcattgacatcagcattgtcaagccataccccaagggtgacgccaaaggctggccaggatggcgattcccggcctctgatgatgagtatcccggtgcgacagttgatcacctctttggtgaagactatttgcacaaagtctatttccgagccgaccccgattacaaggggcggtattcggtgccgttgctgtgggatacgaagactggaacggcggtttgcaatgtataacacctaatggatcttggcgagtaaacgttttactgaccggatatatcgtggttaggaaagtgcggaacttcttcgatggcttcccacggctttcaatgaactgcttccagcatcgctcgctgcaattgacctttacccggtacatctgcgcgataaaattgatgcagtcaccacgtggatgcaatctgatgtcaatgctggagtatataaagcaggctttgcgtcctcgcaggaagagtatgacagaaacgtcattcctgtgtttggggctctgaacaaactcgagaagattgttgcaaataatggaggcccgtttgtgctcggtcgagatttaactgagctggatatccggttgtatgcaacattgatccgttttgacacggtatatgtgcaacatttcaagtgcaacctaggcaccatccgacatgattatccagttttaaacaactggctcaagggcatgtattggaatgttaaagcggccagagactcgacaaactttctacatatcaaggagaatgtatgttgacatgcttttttggtactaattgacaccaactgacttgatacagtatacaaagagtcatgcggatatcaatccaaaggcaatcacgcctatgggtcctttccctaacgtcgaggaggggttcgaagaggactggagcaagttggctgtcggcgaggtcaagcacccctctgtgttagactatgaaactacaattcctgatctgtagtgattaatattggctgtcaagatgtttgatattaagttatctacgtcatgtctggttgtgcctcttgaatgcttttttctagatgtcagtgtttgagatagaacctaggagcacaaaatacatctaatgatactggagaattgggtcatggatggcatactttcgcctcatagacagaggatatcgagtgctaaatgaatgtatatgcatcctagcaagcccagctgggcagcgaaattatcctaaaaatcaatgtcctttgcaactgctcaatccatcgttctgcacacgttccctagtcctccctgtttttttcttcttcggctgtcgggtagcctcctcctaaccatcttcggaagaattcacctcttcaatgatccccgattcaacagcctgtgtccaggtgtggacattcttgtttcccttactagtgaaaattgaaaatgcaccattcggtccttcacggatatccccagagggaccgagtatctgcttaagcgactccgtgctaaacatccgatggatgttccgggtcttttccttctgcagaccgatcatccacgagtcaatggacccttttgccacaatttggacgtattccactaagcgaggttgtccgatgcggtacagacgacagtacgcctagcaacttattgttagcttgcctatagccttgaacccttctaggatctgaattcagacttccttacctggtcttgaatcgcttcattccaccagggatccacaaggatgcacttgttagccatagtcaaattgaggccaacaccgccagtcttcagggaggaaatcatgattttgatatctttctccttgctgaattgctcaatttgcctatcacgcgaggttggcgacaccttccctgtaatctatatgggcattgttagttatgtggctcggtgtttttctcttaccagtcttgacgtacggttgcatatttccagccctcctcctcacacatgaactgaagaagttgaatggtcttcaggaattgagcgaagatgacgatcttggcatttccatcctcttgcacccagtctgtgatgagtttccgaaccgctgtggttttcgctgacggcatacgatccccaatgcacgaaatccaatcgctctcatcctcactgggctcgtcccactcgcgatctgatggatttttcaatagaacctgttgtttgaaagacttttgacgccgctttttgaagatgttcctgccatttcccttccgcacggactgctttctcttctttggtgagccctttggtgaatcgtcggagtatccggcctccttgatgggttttttgcaggagctgcagatgcgggtggcggtatcggtatttccactttggtcgggtagtgcatcaaagcaccccttgcaataaaggtgatgacaggatgtgaccacgaatgcctccttctcgttcacgctattcgtgcaatgagggcatattctgcatatgacttggtagtgttttccctcgttttcgcgcacgcgctccacgtgttcgtaaaattttacctggaggtcggaaaagtctcctggaggccttggtcgaggagcgaccttgtcacccataccgagaattaagttgatgatgacccctgatgcgctcttaaccacgccttctgcttgtaccatctttttgagttttgcaatgacattttggttgagcacagtctcgaggaatttttgggcgaggagcggatggctcacaaacattctcagcattgttataacggccaagatgcatttgctctgtttctgtcttgtatcggcagacccttgtgagatgtgttagcgctcagcttcttttgctatcaatgtcagacctaccattgaccattgcaatgccaagatcctgaatctccctgtaaagaaacttttcagctgggcaaagttcgacctctacgacacggttattgatgcccggaagcgtgataatgggcttgccaagtatccaggtactgtatgtgctgcggtgtaggacagtttcaaggatgttatccaacccctatagagaatgttaatcttggattttgaagtaaaggcttcctcaaggagactaaccttggagtattttttcaggaaggtgtcatatcccattctttccgatgtaaagataaaatggagatatgggtaaagttcttccaccccgctagaaacatttagtcagtactcaggacttcggtcattccaaagcttgccatgcccaagtggtgactagttcttacttgtgtaacggcgtcccgctcatagcccatttgaatttgcctttcaaggctcggacagcgatggaggttgcggaatctttgttcttgatcaaatgagcttctgcgaagtcgaattagtatcaaccgcattgaatatatttataagtcctgtacataccgtcaagaatgatgcggtaccactcaaccttatggaaaggtccagctctacgatagtattccttttctctccaagcctcaagcttttctggagacttgatcatgactggtggtttcaacttcgggtgagagctgcagacttgctcatatgtggtgatcctataaggtcagggacatgaaacatacagtaatctgcttcaaatttcttacacaataagccgtttttgcatcgctctcacaacatcgctctcgctcgttcgggcaccggcgtaatactcgagaacatctctacttaccctttcctcgcaatgcgtagagatttgatcgatcctacaaccgagttaagtaacactcacattaatcttttaagtcgaagagtgagacataccactgtgcaatcaagcttctcgggacaatgatcagagttggggcttttgaacgatttgagaacttttcgttcgcgatatttgcttatggaaaatataagattttgacttctcaaggtggtcttcgttcttaccgagagctgtaagcgttttccccaggcccatctcgtcgcagagcaagcctccatttggctccaccgccgaactctcgcgattgcgctatgcacgtcagctaggtaccatgcttataacgtagaatgccaaacttaccatccacgcagcggccttgagctgtttcaatagttagtcacatatatcacaatttgaacctagtagatcaagatttcaaacctgatggtgcttcagcagtgttttgagacctctaaccttccagttcatgttgatgattgacgccgagggctcgaatttcctcgagtcctgaatcaatgaatttgcgtcttttttagcttgcggttggtcttcaattgaaagcttcgcaacttcctctgcgagcgctgtcgtcttgttcttttgctgggacacaggggtcaattgctgtatattagcgttggcctttgcgccgctgagtatgttactatgcatcagacccttgactttctcgatgaaactcgatgaggttgagattcgttcctgctcttttcccttgggtttgcttgagatctcttttttcactggcctggaagaacattcaagatcactatcatttctggaagattcagcgggctcgggctcggaatccaccagtgactcctcgtctgaggctaatttgaactcctcatcagaacagttttcctcgtcaccagaagactcctcatcattggagacttggttcgagcctgttttatccagcgattcctcatcaggttccttagggaaattctctggcacaggatcatcttgtttcaaggcttttttcgggcagaagtaagtggtgattagtttctgatttggcggttcaccttggatatgggcttccacgtttgtcaacttgctcggcctatttgtatgatcctctagctcggacttcacctccatgccattgacaggacttggagtgtcctttaggacctcctccattgtgttcgtagtatttttagtatttttagtgggtttctctattttgacagcactttgcatgttgaaattgatggatggaccatgggtggtgctgaggaggtggagtgaacaaagttggatagagaagtttagggtgtgcgaatcagaaataggagacgaggagaaataattcggtgagctagctcagagaagaagcaagaatttgaatgtaacaacacagagcatagaaatgaccccgaagttaaacggaggcgatgagacgagttgcttcgcgggttgaaacatagaatgcgtggagataacagaattggataatcaaggaatagatatgtgaagggttgattgtaacgaatagggtgaaggatttagaggtacggactggccatataatagagagatattgatggccgagatggaatagatgtgaatagaacgaggataaagccaagttgagggtgcctaagtgcaagaaggagaatgagagatacctcaaaggcaaaaaatacataattgccatgcagaaaaacttttgattgtcaccttacatccctaaggtcagtgagaaatagagagggtgtataaatgtgttggagggagtgagaatcaacaagcaaaaatatctatacctcccgctaatcccgggaattgcctattcagtaagcgtgaatagcctcaggtttgcaactcgttattgctattgaacctgtctaggtgacaggcactttcgcctacataagatcaggctttcacgttaagatcggagggtatagcatatttatttaacaaataaatcaatttttgcttcctatttactgtcatagggtcaccaccaccagctacttcaaagaatgacgtatcttgtgcctttgatattgttgatcaacatgtcttttataatctctctcattcacctcgttgactggaattctatcaatatctccgttatcttaaagatattgaaaaatatgtctcaaaatatatatcgttcatccttatccgatgttacccatagcagaatacaactttagtatatattctgccggtataatggtaactctctaaagaatcgtctgtaagggacttgtacctatgacatagtgtcatatcaataagacaggaattaaactctgagtagatgtataggccagaaaaccttgttaaatttcgccaatcttacagactattcttagagccgtgtaggtatacgagaatatttacgcaaaatgcactttgtagttggaaaataacagcaaagattcatcgactatcaataaactgatcatacatgccgtgaatcgtgaaagcatatccgaaaaaaggacataaacctgaagattgcagattgtgccaaatgaagtgtagatttgcacaacatagagtcgagatgatgagaccacaacagtgtcagaacgcgaaaaatcttcgaaggcctttgtatccaggctactggtcctggtcctactcaagctcttgctctggctctgagtggccttcctcctcgcttttttcaggagtagtagtgcggctatcctcgtttggctcgggagtaatagagcgacgatactcgggttgctggaaatcaaggatgcgacgaacatccctggggaaatatgtaggtgcctgaacacgggtatcctcacgcagctggtaaaggttggagcgggccatagctcgtcctagttggtagcttcctctagtctgcacagcctctcgaacctgggcgttggtcagactctcctcatgcagttcactatcatcttcctcggggacctgtgcctcatcaacccagagggtccgcagcacctctcgaccatggcgcatggggcgctccgtaaacggggtgttgcggggagggacgaaatcagacatttcgcggttgagtgggagaccaaaggcatcgcgggggccggtggaagcttcattccaagcgaggttggacggagtgtcttgctcttcttcgtcagaggtttcgaggtcagactgagttagaaagatgttctctttatcctcttccatggagtagaacccttgctgcggagggctgggggtctgctggtcctgcggatcttcgtaaatggtaaagttgaggctcgagggacggtgagattcccagacgcgcgagttggggttagtcttgggtggagaaccgggtagctcccggggctgtaggggagccatcgaaccggaattaagttgatatttggggggtggaaaccactcagattcttcagtctcctcggttcctggattcagaaaaatgagttgcccgtctcatgatttgagaataaacaaaataacttaccaagccgagtcagacgagactcatggaccgcaggtgttgagtacagcgggtttccgtagacagaagctaagtaccaaggggaaggcgcgatgctttcctcagctggatggcgctcgcgcttcgccccggtagagatagacacagcaaaagggttttggtcaaagtggtcttccaccgagggtagcacgtagggaattgcagggttcgtctggatttcagcgagctaggtggtgaacgcggagagcgtcgagtgttagcttgctgggacacagagggataacgcgcgcaaacggggaaagcgccgggatatacttaccccatcatcgcccactttaatggtcacctccacgtccgcgggatccatcttgaaagactactccgccgttcaattagtataccatgcccttcgcgagcgatgtgatgagtctatccattggcaatgtctccaggcaaccaatctgtctgacttgtaaagcttttggggagagagcatacctttaggaaaggaaagaaatgtagcaatattcttgctccgaaggatcaagtattggtcctcgctggttggctcaagcgccttgcctgtttcaaaaagaatgtcagcatggaattaaacgaggctcaaaggcttgtcaacacaggggatatacttggctgcttgggttaaaacaagagcaacttgaggctgtaactgtagctgtcctcgatactcggtggcccaaccaaccctgcacagtgtggtgtacaaggtctcgtcggcactatgtcgggtgacaacaaggaagacaagggatcaaagacagaattggactgtatatctcagggaaggtcgctagctacgcttactcttcgtgtgcttagtcgtcgtacgcgtcgctcttggtcgctccaactctcaccatcttagcatttagggttttttatactatatggactctaacttcgcaggccacttcaagtttagaagtacttcattgatttctaatcatgaacgataattatattgtctgaagttcatgtgtggcctaaaatgatacatgctcatgttatacttcgtctatagatagttaggggcaaggcttatcacgtgggcatatatgacatcatagcatgcacgttgtgtaatcagacatataatattataatgagatcaataaagcaagaacaagtgaaattctcattgctgtagattgaaatatgctaattcacggtactggtgtaccaggcgcaagatcaatggtacgtgtatatatagtgaacattcacacaagtctaagcagatcacaagggagacccgcaaacacatcagatacaaacataatcaacaaagatactgaatcccaaggacactgtaggatatgtagtatatgcaatcagaaatggaacacactggaacgactttggcataaacgaattaacagtgtagagaaaaacgatacgtaaaataatcacaggatagaaatttctagggtgacttgagattgggtcgagacgtattacctatattttagcatgaacattttacaaggagcccggtttcaaaaaaagggatggatagattgaggttggtcagctacctatggaataaagcatggatctatcggcaactagcgaagaacagagacccaataaagtcatagtttaagaccgtccatccatcaccctattattgtcaacccccggttcggtcttcaggactcgactcatcagacccacagaatacacagcacggacgcattgccccttgagagatttcaagaacaccgggaaaaatatgaaggggcgaggaaaaaaaaggacccggtaatagatgcagcaaaccacatcagagaagccaaagccaacgcagcaaaggctcaaacgcggaggagtggggggcagttattggacacgggcatcattttgccgaaaggccatgagcaaatacattggggcggaaaaaataaaggaaatgggtatttcgttctctcgaggggaagtgcgacgttgccgtgggatctgtgtggatggaaaatgaaaagagaaaatcacgagcccctgtacatcggcttcaccaagctagcgtagatactcatgaaatggtcatgggcagtggtaaatggtgcgtaaatgtaatcgaggggatagaaatctttttccaatattctccgtttatctgaactggccggggccgaccatgccaccacggacgtcaccgccgtttgactggccaaacatctctagcaggtgtctagatgaaggaggagggccctgtgggccagggttaccaccgaagggaccaagtcccatcatggcctcggggtttggcggcatgggagggaagcctggaggagggccgttcatataacctggaggtggcatcatgcctggaggtaggccgcgcgggaagccttggcgctcattcattgggggcgcgttgccgggcataggaagcatgccaggggggaagttgggattcatgccgcggcctggagtggatattccaggaggagggcccataggactcgatacaccctgctgcgggacaggctggccagtccatccaaggggtggcagatgctcgagacccgggggtcgctgaagtggcatggggggctgattcgcgccttgaagaggtcgcgagccacctggggtcatggggccttgattgccctgagggaatgacatatcgtcaaagaatcccataggcggaccattcgcaggtcgccggcggaggtgctcgctatctggtcgctgcatgtttgcaattgctgggtcgtcgaggaaattcggtgtcttttgggcagaaagccctggcggggggcgtggcatgccttctggcatgagacctggaggaggggcaatacccgagttgggagactgctgggatagatgacccgcagatggtggaccgactcggacttgctgcatcagacgaagcaagtgggccctctccagcgcctggggatccttggagctaacttgggccatggggttctcggggccagcgcccatgtagtcggatcggtgagagggttccctaggagatgacagagatagggcggcatgttgctgttcgccctgcatcatggagatattccgttgctgctgaggtaaacccatctcgtgaggcgtagagttctccgagcgttgtccaccaagcatctgcagaatgcgctgaaagccttcttggtccgcactgtgggatgggaaaggcatactctcagacgcctgctggggctgttgataatgctgggcctggggaggggcactgaaataaggcatcggctcgggttctctggcagggctctctggcatggggctaaagagacctgcaaaacgagatgattttccaggctttccggcaaagagggagggttcctttttagcaactggatcggcagcgataggagtactggcttctggggtctgaggctgaaccttcgaatcgctcaggagtccgaagaatcgttccatcgattcgtcggacataaactgagcaccggaattactgaagatctcaccatcagtgcggcgggtctccggcttttgttcttcaacatgtgcttctctcttctcctcagcaggtgccggggtttgtgcggatgatccagatccagatccagccttcatacgctccttccaccgctcaaagtcctcctgggtgtgcgctcgtcgtggttcgtctcgttcattggcatccagccattcaggttcttgttcaaatttggcgccgcggttccactcacgctcggtgccgtgtcgggtctggttttggcgccattctcggttgcgcaacggcggtttatcgtcatccgcatcagcggcttcttgggcctgttcttcgcggaaccagcttccttcatatttggatcgtgggggctgtccttctttccgaatggggaatcggccatctttgtcacggggaacccgttcagcatttggatcgcggggcccttctttgttttcccatctgtcgaattcgccgtttcgtcgaggcttgcgctcttgctcatctgggccgaatgtgcgacgtgggcgcccggcattccagtcttctctctcaccacgccgggcagtcagtggccccggcttggcctcccgtcgatctaactctttctctggggcatcgcggtccttgaacaacctgtctctgaagttgaatcggtcgttcttcgtttcatccgaatcatttggccgtgccgctggtcggtccgtcagatcgaacgagcctttgccgccaatgcgagatgaggcgaaggcggttttggggggaccgagtacaatatcctctgaaaatagaagaaatccaattagcaaatgcctcagataggtcgggatacttgatgttcgacagaaagggagacaataataccagaattagatccccgagagatatgtttggcttcaaaaaagctaggtcttctgtttgtgccagtctctgccggactgttgacatcacgggcgccatgggttttgcgttgtgtggttgtttggtcaggttgaggcctacaggttgcggtcagtcttgaaggtgacagtgcgggacagctgaagaattgcaagcattggagctaccatacatccactcttccattggaggcagaccagcaggctttgcgacaaggggcgagccgcggagccatatcagctcatcgatctcgtaccgtcgcgccatggcggctcggtctgtggggttgtgtgtgcgtggtcttcttcacggtgatgatcggttcattggttgaatgagtaacaaacccagattgagtaaccaaggatgagacgcgaaggtatgaaatatttctagcaaaatacgttgaataggaagcaggcagcgttgggtggttatggaaaagaggttggatgaggagaagcacacaagccaccttgtggcgatggcggtgaccagagtctcgggagccaactctccacttgccagttggtcctttgatcttagaaatttatatatctttcactcttactccttactacgtatagtcttgatattgcaaacacgatagtgttatacagtagttagtgaaagcccagatagtcaccttattttcatgttcaaaatacatgtggcatagatctataagacaagcgaccctcataagcgtacatgtactctgtcgcctgaatacccttcactataatttctgtaactagtaaaagcattattcgggagtgttaaaaaaaaacaatattagctatagaacaaaatacgggtgtatatgtgaaaagcagcgactgtttcatgtataccaaagcgacaggctttatttagggttaggcgtgtgtcgctattcaaagtaaaagtttaaagtttaagtgtgagagctagatgatatttcatttatattgcattgatgatattatagatcgtggaagcttatattgataccagtatatatgtcagaattgggagttgaggtagcatgaaagccatatgaaaagacatctgaaaaagaatcagtacgatataggtctatatgtataggagactcgtattacaaaatactgcagaaaatccttggattgtactaaaagacatggaagattgcttgttgaaaacaaccagccgaacacaatagatctcagagctgttctaacatatcgaaagaaggaagatcatcttctgttggagaagataattccaagataacataatgattattccagccacaagctagatagaccatcgtaagagcacagcagcgattatgacgggcaatacgctaattagctcccccagacctgcaaactcgggcggaattctgacattcacaaaagccccagccgcaaggagcacggcaaatgtgttgtagacaaaactccaaacgaaattgaacttgatacgtctcatagagaccttgctggcatccatcatggtgagaaggccagacagatatggacgcataagcacgacatcggctgcagactgggcaacatcactgccttcgtttatgtgaacgccgatagttgcttgcgcgagtgccacggcgtcattggtgccatccccgcaaaagatgacaatcggctcctcaccacctgaaagactgcctaggagatctttgatgtagacctgcttgtccgctggagagctacgagcacgaatgttgctctcggggatagctaaatttgtcgccacgttttgcacggcgccttcgtcgtcgcccgataccacatgaaccgtcacgccgcgtctctgtagggtattgaccacatggggtgcatcagctcggagagagtcctcaagaccaaatacagcgagtagcacaccattgatggtgaagcagaaaacagtatagccttttgtaagcaccggttgcaccagggggtgcgtggaagtcttcagccagtgagaattcccagcttgtagcgtttgactaccaagtttagcttccacacctcggcctgtcaagcttttgacgtcagggacagctgttgcaacaatccccttgtgcctaatatgattaccaatagcaaccgataccgggtgcttgctgtcaccgatgaggcccaaaagaagtgacaggcatgattcctcgtctccgaggtaactctcaacgactacgctgagctttccctgagtcagcgttcctgtcttgtcaaggaccacatgagaggctctataggcgacttcgatagaatgcgccgacttgaatataacccctcgctctgctgcgataccgctgcagatgacaaccaccatcggtacggcaagcccaatggcacaaggacatgaaactataagcaccgtgatggcgtaggtgacagcctgcacggttgcttcggatctagtcttagcttgtattgatatgccaagagccacccaaataacaaatgtggcaatagtcaagcctacaataactggaacaaaatatgaagccaccttgtcggcaagtacttgaatctttggtttggaaagcttggcttcatcgaccatggcggcgatagtgttaatagcgttgtcgcctgggaggcgagttagcctgacaattagacttgccgatccgttgattgtccctgcaatgacacgcgacttgggtttcttttcgacatgccgcgactctccagtgagcattgactcgttcacttcagatgaccccgatacaacagtcccgtcggtcgggattctcatatcgggaaggaccttgaacctgtctccgtattgcagtagcctgacgtcgatttcacgagcatctattgaaggtgattcttccacaagaagggcagtttgggcctgaagcgatcgaatagatattgactcgaccgctttttgtcgggcaagtgtagcgacatatcgtccgaacatgatcaatgtaactagaagtgtgcttgtttcaaagaattggccagtggaaagaggtctactagcaacgagaaagccgaaagaaaccacagagaagatatatgccacgctggtgcttaacacaataagaaggtccatctcgatgactcgcgaaaagacaagagccttcaaggctttgggataaaaaggccctgctatgacaacctgaatgatagtagccaaagccagcgaggcggagctataggcgatttttctctcggagatgggggcccatgccatgattaagactgggatggtaagaactgcagataagagagtcatgaacccggaatggcggacatgcttgctaccagctgcaagtgttggatcaccagagatgggcgcaaggcttgctatatcaccccagtgcttttcaatgagatctcgtgctccaaccacttctggatcaaaagatacacgaatagtgcaatttccgacgagcgaaatgtcactcacaccttgcggccaagcctggttgacgatcaaacctggatccccagaaacaattatatccatagctgacccattactggcgattatctcacatttgaactctgtggtccgctccaagtgctttataacaagctccacagtagagatactgaggtccaagtcgaattcagctcgagatagaaccaaacttgtcctcaagttcccaacccctgacattgtcgcgagggttctgttgagtttcgtctcacagccagtgcaagtcataccagatatcgagaggaccacatgctcgacgcctatggcctgaccctcgagatcaggggcaattctaacagccccacccttctcgtcgttgggtaaggatggcttttcggaggtacagcaaatatcagcacaagagccatccgctggctttatctctgacttatctgattcggagatacaggggttggtgaagttgttgccgcaggtggtaattttgggtttgcagcaagaattggtggagcaaccttggctggcacgagttttagttacacgtgcaggcttatactttccgccatggtcggtacttcgaagcggcgattgacttgaaggtttactacttgcgcagcaagattcaaccgagacgcacgagacagactgtttcagtggccgttcagagcaccgacccttacccagcgaagagcgttttcgaggctcgcagcatgattccttgccaagggcaagaagagcacggcagatacaccccagtgctgtaagcctagcagcatactgctctctaactgagcgatggtgtcgattgcaagctctgccctgaagcgttgcaccttctgtcggtgtggatgtcgaggaaagagctgcattagacccaaaattagtagagtactatgacataagccatttatattcaacatacagtaaccagctgcttccatgcatggtatatctgaccccgtatgacactcacgtaaagccagacgatcaaggcaggcttcatcacagcatggcgaaggcttgtcttggcagcactctgtcacaataggttcaacggaagtagcatgttcactcgaccatggggtaccggagccggtgtgtgtgtgagggtggcccgaagaaacactacagcttaaaattttagatttggcggtaaaatttcctgcgcaacaagctacgttagcggaaaaagcatcaagacgacggatattcttaccagcagccgaggcagactggtcgccgcagcagccttcctcgcaagcctcaggcagagctgcacccttacaaggatcagtagggtccttgcatacggggtcagcaggttgggcagaggaagttgcattggcattattatcatctgttttgtcgttgtttcggatagcgctgttcctataagacttctcttgacttgaagtctccgatgaactgccacaacaattcgatgaactattcgatttcttcaactcagctttatcaatcgcatccgcttgagagggcgtcctttcacagcaagagcgtcccataatgctggttggatagttcaacgtggagtcgtgggaggattgtggggatctgggaccgaggagtggggtcgtcttttggcttgtttggcttgtttggcttgtttggcttgtttgcagggaactactcttcgtagtacgtactagtactgcttaattaaccctagagagcctttcactaactacttacacgccagttaccgtatttgagtagtaaaccaattcattattctagcaaatcattccaagcaaagtcgagcagagcgttttgttgtgtactctatgctttctctatgtgaaaccgaggtgaaacaagaaaactagatgttggatggtaatgtgattcccggggccccgcaatttagatactccgtacagtgctgcagtaagtactaccatgctcgtgaatacttcaaatacagctattgcccgctgatacggatgtgtacgaatgcttggcagttcaaccttacaaggtcctccgtgcttccaaggttgcatttttatcagtggagcccaggtccggtgtttatgtacatatcccgaagtccgttttaggcaatgaatatccaaggcaggggtccacttaggacgccagcctacattctattggttcctgggaattgcattaaactcaaagcacgtggaaatgaagtttcggccgaaccggctatgtctcggaaccgacaaccggccccggtagtgcaggccctaagtcgttccctccttttaaaactcagcccattaccgttgcaacttgcaagttggccttggattccccgcaatacgccctgcagcattccacaacatccatacttaccctttgggacagagcgaaacacgaagctgccgagccgaccgagccgaactatatacttcgccttgaacaggcagcaccacagtttctggggattggatgctcgataattataccaaatgatctattgtgcctaccaggcctgtcgattattggaaaggcagcacatccactggaataggtgttgaggcagcctttcttcctctctgtccctctcagggaacagctcaattcattccatgtttttctttctcattcctattcactacaataggacggcattcttcaactccgcatggtttccattacgtggtgcacgtgtgcgtatggggtatactgtgtgcaaagaaacaagaagtaaatgacattcgaaaaactgactatgacagagaccacccacagccataaagacagggaaaaacaggacaaaaaagcagtcggaaggatacaggctgggcaacaacaaaccgaacacttgactcatggctggcagttgaccactgtggtgatcattcaatgatgccccgaactggaacccggcttcagacagtatattttctgcacatccgccaactcagcctcgaaatcgatctcaaggtttttcagcagaccgtcggccaaatcaaaaacccaaccatgaacgatgggatactggttctcttggtagctttgttggacagccgcggttttgatgatattcctacaggattcaatcacattgagttcaatcaatcgattgtatcggtcgtgctcgtcggatatttcgtcaagttcttgctcgtgcaagcgataaacatcgcggatgtttcgcagccatgggttaagcaatcccagatcagcaggtgtcaaggccgcctgaacacctccacagttgtagtggccgcacacgatgatatgcttgactttgaggtgccgcacggcatagttgatcaccgacatgacgttgaggtcaacattgggcactaggttggcgatgttacggtgaacgaacacctcgcccgcctccagacccatgatttcgttggcggggacacggctatcgctacagcctatgtacctgattgccgttagacgaaaaagacaaagttggagcctatgttgcttacagatagtctggtgattgtccagcagcaagcttgtcgaaaaaggtcgcatccgtctcttttttcgacgcgacccatatcttgttgttttggaagatatggtcgagcgactgttggagatagtgattgccgttcggttcggaggccatcttgtcagagtgtacaaaaacttggcaaatatgaacgtggtttgaggttttggtggtctcacgcagagcagggagcagatccgaatctgttgggacctgtcgaggggtttgtgcttatataagcacgtgtcaagacctcgggaccatccgcaaccttttccaaggacccggtcctttgccttcgggtattgagttatcacggtctaacggaaactcttagtgtcaattttacaccgactatttcgactacagcttcactatctcaagagtagccagccacttatgcggtctgtcatgtcttttgggtagtatttctggatgtcttgtttcggatatcccttatcggttttatagctagacggcagaaaaaggcggaagaaagtgtagaatccttcgtcaaggatgttataaaccaatgacgccatgactctgattctgccattcacattctacggtcagcatcataccgccgcccgcactgaaccgccgcgtttccaaggtcgcacacctcggcccgtgtcggagcggcacgcaagaagttgacactcgggtgagatagccaggggaaatagatcggcaccggcccgcgcggattcgagctcgtagctctcgagcaagccgaatttcgggtgccaggtgcacgataagccggccccacactgacgccgtccgatgagatctgcagaagctgatcgggtagcggctggaggacgagaagcggaagctcttgagcagcttacctgctcgcagccgatgtgctgaccaggcggctcatgtcgtcgctcgcgaggctggggatgcatgctcttgccgtcccagggtggccgtccatctgcgcctggagcagggacactttggttgggtcagcgaggtgcaggccggcaagacggtcccgtcgggagaccatgcaagcagtcctagatctagatggtggaatgagtagcgcttgcgcttcattttgtgcagttcacgatgttgacgacaccttctcttttcctccccgggatgggctgctactccgctcagacaatcactctcagtttgacttgcaactaggggtcgatcatggttcggaccacaaaattttcgtattctttaaatttcgatatttgatccctactttatctatgtccatctcctggactgagacccgagaaagctgtggagggaaagttttcgatgacctttggaaattggtgggtctagacgttcatcccagaagaataggatagtgatgcagaatatgctagattgtgaattatgctacagtacattaaaaatgcgacctacaactttcgcaaagctccgtcgttcagcatgaaaaataacagtatcaatcctatgaatttccgacaggtttgaacaactggtccttcgggtgtgggggataaatacggggcgttgtagctgccaccgatgccaggtaccaaaaatactatttggtggaaagcatggtgttactttcaatggcgtggctatcgatgatcggtgaatactggatcatccacacgttgttcaccacttggcggagtatgactgtttcctcgtaggtcgagtgaaaggcaaatggaagcccttgatcaatcatgtactcgaccacttggccgattgtatgacgcatcacattcacgttgctgaaccgacctctcagtttgtgtaccttaacccacggaactttgagctcccccacgactctgagtgaaagtgaaagtggaggattatccgataccaaggcaacatcaggtaccttggtatatccagttccaaccgacttaaaagtcagcaaaccggatattcacgtgttgtgcccggaagacagctccaagaatctgccccacagattgttcgaaccgtccctgaacgcctgtttcatcggcaacatagacttcttcttctctcaggtcccgaccgtcaattttgtagtcgattatggcttgggaccagcttgtcgacatgctagcccagacatcggcatcgaagctttgccatcgagatacacgacccgtatatctaatattgtgcaaggcagagaatttggtcgtgttgggggcaatccgaaggcctgggagagcactcttgactgcatctttagaaaggaccttctcaggcattatctgaacaaggcctcttgtcagtacaccaattaagcttcacgtgcaagactctttggtaatacccactaagaaatagaaaattcaagatgcgcaaattgctgggttgggaagcaatcaataagagagagtgaatatctggatagatggtaatgatgatgatccagctactcccatgaagccctctgaatagttcatggagacaaacggcctggaagccacaaaggtctcagaggggccttgaatggcagagaaagcccaagtgtatgcctaaatgcagcaaaatcaaacctccggacattgaacgaattatagagaaagagctgatatatctcgaatgaggtgcgactcatatcataggccattaggtatattacctgttgttacttctcctacactaagacctagataacatccagcccatatttgagcagtagactaggcagaagtaggcgtttgttagcacacctgcggtaagatgggccagcagcatgcaaacaaacctagtacgtagagtcaaagtaatgatgcagactgcctttttgagttgatatacccacacccctaagatgcctgattcttgccacattccttaggcatttgatcaattggatactatctagcatctagcattgagatcccctttttcagaattgaactatcttgattattggtgttaaatagctttgggggatcttttaatgggacgacggtaagtgttagatcatctccatatggcttggtgggtgattaatcagatgttaatagtttggtgtctggtttactttaaattgacctcacaaatttgtcgtcatttccatcgtctccttgatctgaccttcctctatctacaattcattccatatcacaacatcttccctatcggacactcacgatgcccgaaagagagcctcgtcagtttcttccccagatgattggtgaagggatcattacctactgcccgtattctgatgaccctgtgttatcttctttttacaaagcgcgccaatgggtcatcgtggagaagctggatgaggacctatacacggttaccccagaggattccgaccaagacatgggccccgcatttactactggaaaatttctttgtcgccgtggacagcacggataccatgccttcatgcatatacacaaacaaatccctctgtatggcactgaattcaataggtcggaggatcgggagaatcaggcttccgatatgtctcccgtggagctaaatgccctgaagaagtttacagagaatgagtgtgccgctgctcctaaactgcttggatatcaaattgatatacaagatccgaccgaccttgtttctggcagatttatcatataccttgtatttgacaaggtcccaggacgtcctcttgaatttgacgagttctggagttttcccttacgcaaacgcaggactattcgtgagaatttcagagtcgcctatatgtttgttatacagtacaattatgatcacgttcttcgagctaactagaattagggaaattctgaggcttgggtaccagcctttggaaccatcctcattacagctcatatacgagagagaggaagacgatatgtatgttctactatacccctgatagcacaatcaccggttttgatatagctatgaagattgatgaagagccttactggacagacaacaactttgtgatatataacctagttctgcttccctcgaaatatgagaagtacgttcccaagaagaaggatatcaaaactgataagaacggctggaggtggtgagaaggagaattgatatcaaagaaggaaccatggggcaatctctgtcgctcggtctcatgtgtgtgaccaactagcttacaaagaatactaccaagatctatcacaaacgattctctctattcactttaagtactaggaaagtctcacccccgtagaatcgctcactacaatttctcaactcttcagtctacgtccacgtctctgtaaagctgtctccatagaaattccgctagtaggtcttgaaataaaggatttgggagtctttggttggaaatgtgttctgtttcggcgccccttccacaaatttctcctggaccacaatcttctgcggatatattgccaatatgctatcctcaccgattcacccctgcttttctaagctggccatatacttttttcaatgtatcggacatcacagcctgtctgcccagtttctaaatacgaagatgtcattcacgtcaccaccgcctaactgatgaaaaggataaggctgacgtcgagagcctcatatcttggcatcttggcatcttcaaagtggaagcttgacaatagaagcatttcaataatttttgacgattgcgcactgtactacttcacccgtgactagggttggggggaggggggaggtgagaggctctggacgtttgaaaattgcgaatctggagctataatggtttcaacggagcaactacaaacttgggaaagatcctcgagtgcacctacagctgtcactgggtccgtgagatggtcagtgttacattcctataccgattcgtcattcctcctcaccatcccgtgctgtcgcagcccactctcctgcagaagcttcatcttaaccggaggaggagtcgatagtccaatgcaacgctataacgcaattgaagcagcaaatttgcccttgaccgaaatttctgttggttctctgtatttattgttgattttctccattggcaaacgtcggtccaccagctgcttttgattcccaatgagtatgtagactgtactggttcatcaaagactatgcagaactgacattctggacaacaccaggtaatagtgagaccatccttacagacacctcggtggtggcagcccgcggagtgagcgaggtgaagtcgctgcatttggatgaagggttagggggggactctcaggcatcgcaggaatcccaggaaccctatgatgatgtgttcacccctccaaccgatgaagaaaatcaaacattgcgcaaagtggccgccaatctcccgttggttgctttttccctctgcctggtcgaatttgccgagcgcgcgtcctactatggggcacagacactcttctccaactttgtggaattcccactgcccgaaggtgagcctcattttcaaatattcagtgtcgagagtgtcattaacaagtataatacacaggtggcaatgccgccggtgctcctccgcgcggaacccaaaagacagccggagctctgggatggggattacaggccagcaccggcttcgtgcttctattcaaatttttggcctatattgtccccatcttcggtggttactgggcagatacttatgtcgggcggtataaggccatcatcattggtgtgtttatctgcggcgttgcccatatcatccagatcgtcggcgcgattccctctgttctccagaaaggcaaagccaacgcagctccaccgtttgtcattggcctcttacttcttgccatcggtgccggtattttcaagccgaatatctctcccactgttctggaccagcataaatcccagacgccgtacgtgaagactctgaagtcgggtgagaacgttattgtcgaccccgaaaccaccaatactcggaccatgctgctgttctacatgtttgttaacattggtgctttctacatgttagcgacaacctacgcggagaagtatgttggatattggctttccttcctgctatcgggtatcatttacttctttcttccaatcctcctccttgctgtctataaaaggaccaaaaagcaacctcccagtggaaacaaagagctcgccgaagcctttaaaattggatggactgctcttgtacaaagcaaattccagttctggcgcaaagacttctgggatttagcaaaatctgccaaccttcgcagtaaggggatcgaagttagttggacagatacctcagtatcaaaagttgcgaaaacaattggtatcatcatccctcaggcatattgatcaacgaattctaacatcattaacagaggcatgcgacatcttctggtttttccccatctacaatttaaacgacggtggtatcggctcagtcgccacgaaccaaggcgcatcaatgatcacaaacggagcacccaacgaccttctcaacaacttcaacccgctaacgattatcgttgtcatcccgatcctgactttcgtgatctatccgttccttgagcggcgcaagctgaagcctggccccataacccgaatgacgattgggttcgctgttgccactttagctggcatagtcggtgcactagtccaatggaaagtgtaccagctctcaccatgtggcacccacgcatcaacgtgtgacgacgtcgccgatatcagtatctggtggcaaattcccaatacatctctcagcgccataagtgaatgtttcgccaacgtcacggcgtacgaggtggcctatgctcgtgccccaaagagtatgaaaggcctggtgattgctgttttccttttcatgacggccctatctagcgctcttggtgagattcttatcccggcgactgcggacccatggttgatctggatttgggctggtcctgctgtcgccctggcggttcagactgttattttctggttccggttcaggcatttgaactctgagaactacttcgccgataatgttgtttctgatctggttgaggaggagcaagtgtcacttaaaagggaagcttgagtttcatcgtctaacaacgcaaagattggagcggggcactgcttgtcttgtttcatggatgacgaagtgcaatatatttgccaacttcattcactctcctctactattcaaatcttttcggaagaacgcttgacttaagatagacagaccttctctgtaatcatctgactggagaagagtcttgtgccggctactgatacggttacgttcgagtaaaaccaagtgaagtaatggattttagtagagcagattatattgagctatctgaccggaacatagagaattgtcgcaagttctagtccaccgttgtggagccaagccaagcgcctgtgataatttccaatccgtctttcaaccaatccgtttccaacgttgttgcaaagtcgaacccatggtcagcatctaggccatgaagcttaacaattgcatcgggcgctttttctcgcactaaatcaaagaatcgctgagagccctcaaattgcacagctgaatcctgctttccatggaaaatgaaagttggaggaagtttcagacctccggcagcagcgagattttcaaccctcttcattgggaagaggtagtcttctgacccgaggaactctagcaatcgaccattttggaaaatcgagaatgccagctttagacgatctgggggatctgcagcagtagccacagtgggcaagggtgcggttcgcatggctgcaatgtgttcttcaataatttcattcggcatgttgggaactccaaggatagttttgggatatgcctctgtgtagaactttgatttcaaatcaagaactggataggctgcgatgacagcacgaatttccgatgggtagctgagtgccagttgaatagccagatagccgccttacactcaagtcagatcatttgttcatgcaagagttcactacaaaagactcacccgcgctttcccccacaacaatgagcttgtcgagatcagggacaatatgaccatatccagcatctttgattgttgcagcaaattttgggctgtgtatccaatgccaaaaatcgtccatgtctttcaatatatcctttcccgatacttcaggcagcaaacggtagtctggagccacgataattgcccctgttgatatagcgtagtccaacgtccaattcgcgaaccaaacaggatagcgactagaaccagtgacctacaggcaagttaattcacagtcgaaggattgtgtagtcttcttagtgcaagtagctcataccaaaaatccgccatgaatccgtatcataactgcacatttcgaaagttcttgctgtgatagtatagcccgagggatgagaatatctacattgatgtgagaacgaccctggttgaagctcttataactcgtgttgatcacttgaaatggctcatatttatcagcggtgtcaaacttcgagaaaatttccaccaagtggagataaggatcggttgccatattgatgctcgatatgggaggagatagggcaaggaggtggggttgttcgttcgtttatgtaccttgcgccttcgcatgacctaaaggggaaatggagcgaaagcgaagagccgagtacatacgtaccccaagacccgcaaggttcggctagtctgtaagtcatagagctacggacttgactaagcaaatgaaagcatagccgtacgatagatggcagtatataatactggcattgttggaatcttgcgctttgtcattgaagtctagttagcgactgcacgaactatgcaaacaaaccagcagatgtaattgtttcacagctgaatagagatgtacatggtgcaaacagagcaaatagagcaaacacagcaaacagctgatcggcatatcggcgatcggcgcgttcccccgctgtaaagtgattgcgtaactacaggaaaaaagaaagaacctccaacaatttggctatttcggcccatttatctgtccaagctgcactgtaacttattgcgatctatacctctccattgactcgccatcgatagactggaacctctggttaaccgacaagatgggccaggacatgtccccgccacagggcgtcacatcccttctggacacggatctatacaagctgacgatgcaatgcgcggtcctcaaatacttcccggatgtttgtaagtagccctaaccgagtaatggggatctgggctgatctgggcgcagatgtggcctacggctacacgaatcggaccccgcagatgaaattgcatcgcggggcatacaaatggcttctagagcagatggacagtaaggatatcccttcttgtcgcaatcgtacagcttctaaccaatttgcgtgtagaactggccgtaattcgtgtcaccgccgaagagcgcgaatggctccgccaaaagtgcccctacctcaatgatgagtacctcgccttcctagagaccttccacctcagaccctccgagcatatcaagattaagttcattccggaagaagatacgggcagcgatgacgatgcaggagacgtggagtacatggttgagggtctctggctcgacaccatcttgtatgaaatcccgctgctggcgttgactagccaggcatatttcatgttcaccgacaaggactgggactatgaaaaccaggaagataaggcataccgaaagggttgcactttgctccggaatggctgtgtgttctctgaattcggttcgcgccgtcgccgcgactaccatacccaagatctggttatgaagggactctgccgtgcggcagaggagggaaagaagcagggctggcccggggtgttagccggaactagcaatgttcactttgctatgaaatacaatactagtgccgtcggcactgtggcccacgaatggtatatgactattgcggctatcacggacgactaccagaatgccaatgagttggcattgagctactggcttggctgctttggagagggggtatgtattgtcaactctccggtatttagaaacacctcaggctaactagagaaacacaggttcttggcattgctcttactgacacctttggcacaccggctttcctgcgtgcattcagcaagcccatctcagtgccaaatcaaaagggtggtactaatccgagcacgacaacctacgctcaaagctacaccggtgttcgccaagactcgggtgaccctgcgttcttcatcaagatggtccgggacttctacgatagccagggcattaccgagaccaagacagtggtattctcagattctctggatatcgagcactgcttggagtacaaaacaattgccgaagaggctggcttcaagccaacctttggagtgggaacattctttaccagtacgtttgagttttgcaatctcctgcaacacaaactctaacgaattcgcagatgattttattaacagatcaaccggactgaaatccaaacctctcaacattgttatcaagatcgccagcgcgaacggcagtcccgctgtcaagcttagcgacaatctgggaaaaaacatgggcgattctgagaaggtccaggaagtcaagaagaagctgggctatatcgagcacgagtgggaagagggtgatgagagtcgccgctggacgaaaaaggcatagactgcctgcctatctgcaccatacaatttgcctttgccactaaatcataggccatttgctaaagacttggtaaacatgagcccatgatcatattgatgttggagaggtggttattgatatttgctagaaataatgtgccaactccatagagaataagaatacatgatatcctgaagaggtctgaattccgttcctccgcaacgaggctctccagtgaggtacacccgagccatatgcactaaaagcacccaaagcttagaccatctcaccttcctcattttctccgttgccttcgtcacttcgttcgcttgttcgtctccaacgtgctcatagtatcctatctgagccatgggggttggggattatttccatttatactcacttttgttatcgttccttcctcgggcagaaagctatgaatatcttccaatagttgccaagttacacgtcaagggacgacaacaaaaatcctaatttgttatacataacctagaacatatcatccccagactcgaaccccaagtcccgatctagatcgccagtgatttcgggccttgcatcattcattgactggtgacgaaaatgcattggatgaaagtcatctgtatcattcaaagtaagacagaacgcatcgtgattgttttgatcttgatctagtggaggtgttgccttttcaggcatgcggaaggtttctgtgttactgtactgattcagatcagtgtcttgaaacagctcctgtgcccagtcgacggtatcttggtcttggggcgggggtgatatatagggtttatcttggttgttgtttggattgggaggggtttgaatatcacggaaggagtcgatgtcgatggacataaagttgaaaggattgttgtctatgatgccaagatcggaatcaaagtcgaagtcattagggaatagaggaggtgcgggttcatgtgtggtttcgacgctgggcttaatatgatgtatattcccctgagcagatgaagtttgtgcttgcggcttcgagatcttggtcacagcaggtagatgtgcttggggttggaatatggaattgacattgcttggtttcctggtcgccaaagacgttgcaggggcattcaagttgtattccatgacttggaagaatgtactagaggcgcccgcctgcattttgatagctgcctcgatgttggcgaactcttgactggcggctggataaatatccttgagacagtgaaggccttggatacaacgatgaaagttgtcgacactgctttcgcggacagcggggtcctcggacatggtgttggtcaaatgcgccacagcggcaggtagaatcacagtcactccagactgcggtagaaaccttgtcaggttgagctgattcaggccttgaataatatgtgtgatccccgcggcagcatcgttcatttttgtacgggcagcgttgcgccagtccgtccgcgatttagattgatctttcaaagcagtcgcccgaggtcggtgaagtgcactgctggtagcatgatagagcatacgtaacatcgcaccatgaagcagcagcacattttcaccttcatagaaggtattccccgacttcgggatgaattgcgcatctttagggagggcactaagccaagagtcgagcttttggccgcatcgcgcaaactcagactcggaagcctgtcgagggataagtgtgactgtggttcggtctgtggcaccaaatcggcactgagatggtgtatattgtgcgaataataccctaccaatacattgacagagcttcaccttctcgatgaacagggtggcgaggcgtttctgatgtgacacatcttggagctgacggcaacagaacttagccaccacatatggagagaaaggttcaaaatcaaaatcatccattctgagcattggaacactgctcgttccatcattaacctgaagcgggcgccgcatacccatggcgatcagccgatctcgagagtacagacaccaccagagccgagaacggagccgttgagtccgtatatcaatttcatctgatgcagggtctttgttcaaaccgattgactgtgcttgtgtattacatactccaatccaatcccatatatctcgctgtgggctgttctctgaatcagcccagtaggtcatcaataggagtgtttggagaatcacgatgcgatcctcttcgcagtcgagagaatagagtaactattgatgatgagttagttcactgatgtcgcagccccttgaagaaagacaaacccttaatcgagtatagaacgcattacgcgcacttttccgggttgaatacccagcatcctgcaggtgcttaaggtcgacgaaagccgtaccaacaaacatgactgcctgaaatagtaagatgctaacatttccctctgggtcattttcagccacacagcgtaagaactcttgcaggttcaaaactggcatgaaactgtgtacccattggatgtagcagcgcagaagctcatcccgcaacccactctctggaattgagacggcaccacgaaatcgtaagaactctaagtcttctggggatatgcgagccggcaagggttttaaaaaccggggctcgtcgtccagtattgccgtcagtgggtcaaagtccgggtctattaggtcttgaacggcagacaccatgtttgatagaggcatcgagtgctgcacattggggttcccccgtgtacgccatatcccggcaggttctgactcgtgtaaccatggggattgcggatcgtatccatgaagatggtggcgcttagccgtgggctcttggcaagattctgccaacttacgtttgagagaagttgaagacatgggctctcaggtgtgatgtgtcatgtggccctggttgggggtagacgtatgcgattttgttccacagggacctcaacgcataagcctgcaagaaggcggtgttcggaactggggaaatgtgggggcaactctgcggggtcttggcgcctggggaaatcggcccaaatatcgttggcttgatgtcattctgctccattggggatttgaattggtgaatctagttggctggatcagtgatctatatacgatgagaaatgaaattattatagtccaccagtttttgaccatcgcttcttcatataaataaagtacgtaggtcactatacgtactattttctccagttagggattcctattgcagcctcacttttataaggccctcggagtcagcccaccgagtagtttcaaaagacgcccgtgataaatttgatcgaaatcatgatatattaagtactcagttcatactcaatccgtcagtcggtactcacaataggattatttgtgaactacttcctgatcaccatatgctgcatactcctactccgatcgccgccctcaaaatatccgttacaacaagacgaggcaaagaaatcaagtcgcagaaacagcctgttggttgtttatttagagttgcccgtgcgtaagtggtatattccatctttggacatccacatagcttgccttcactctatcttattggccacggcttgttggttcctttgcgcttcttcggatacttgctcagtcatgggtaagatattgtgtttttctttatgaaggatgatcgctaagcgctacaaacaatcggaggcgaggggctatatattggcgctcatatagatgacatactatctgagagaaagatagagagatggcttgagccaagttgcggtagaatggtagaatggtagaatgggaatttctagtgtcattgtacaattggatagacaaggtgttcagcgatagtaaaatatatatcgctgcgtgtttcaggcatagattcggcattgctataattctgttgttttacctcatgtatcaattggcgtcttattctacactgttagagatttaataatcgacacaagaaacgtacgcatccatctcaacttgttgcagtcgctgatagctactcatctagtgttgtcagccgattttcaagatttgtacaactgtgctattacaaagcgcagtcggatatggctgttgcctcagagatctagtttcagcctcttccaaatcttgagggactaggtcataattatcacgggccaaaaattggattgtaccacagccggacatccagcaaatggcaaaattcctgatattcgtgaatctcaaaacaggacacagcatgtcagatagtacatgccctgccaataaaatattgtacaaattatccaatcgaaaaacagccgagcgaaagatgctcccgcatcatgttttcctttgaccgacgccgatatgcttccacaggtttaaaagagggagtccgagtcgtaccaccggaggtatagaaagcgtgatggttttacatgctgcgcgatattagatgaggctcgttcggttgatctcgatgcaaatgtgttgggttggctcgacttacggaggaaggaggaattctccgaagcttgagtggaggaacgcaataccggcctaaagatattgtcagtttcatggataaaatcgagatgttaaaattgttgattaggcaacacgtacgccgaagatcacgatgctgcggacaatggtcttgttctcggggttggtggcctcgtcgtagacagtgcggacgaagcctttctggggccgagagccggagggaacgatgcgctggtgaggggccattttgtatgtgatgtgagggacgaatatagagaacgtatgttgatgttggtgttggagtgatgatcggacgtcgagaaatctgcggcctcgggacgcttggtcactgcgcctttagctcccgtggacaaccgtatttattttgcccgcgcagtgaaggacaatgcgacagcgtcgtctggcctgtcctttatatctagatctcctcactgctgcttcggatatatctctcccaaaaccaatacttctacatatatcactgccacggatagtggttgtctccacattgtccactgaaccggcgttttcgccgcagcaaccaagatgaacgtcgatgagctcttcaaagtgagttccaagttcacctactgaattgatggcatggctgatgagtaaagaaatcatctgcaacagggagcgctaagcgcaagttcgagcccgtccaagatccaagtacgccctttcctcgcaatgcgcttgccgcaaatcctgacgatgacagatgaacactacaaatcagcaaaacttgaccccagtggcgatgtaagatcaaatggaaaagcaccaatggtggaggacgagattgacgacggtgaagctggacccgagcttcctccggacttcgaggacgacgtcccagacgacgaggagggccgcttcttcggcggtggaatggagcgcaagacagcccaagcaatggaatacatcgatcagcaagaggaggacgaggctgcggtatggaacttttggtacacatggtatctatccaggggctgacggtatacttatctagcccgagaaattcgactctgcgtgggtgcgccgttttgcattgaatttcgagaagaagatatccaagaacgctgaactacgagcaaaatttgagaatgatccgcaaaagtaagtggataccggacatttgtatgtaccgggtgctaatgatgcttcaggttcatggcttccgaggccgacctagatactgaaatcaaaggcttatcaatactgtctgagcatcccgacttatacgaggagtttgctcagatgggatgtgtggcatccttgacctctctcttgtcgcatgaaaacaccgacattgcaattgatgtcgtccaaataatcagtgaattgacggacgaggatatggaagcagagcaagaacaatgggatgctcttgtcaactcaatggtttgttgaggcatggaagtatcagtaccaagtgctaactatcactagatggaggccgacctcatcgaattgttggctcaaaatctctcccgacttgatgaaggatctgaaacagatcgagtgggagtatactacgtgttaggtgagtatcatgtttcaagaaatactgcgagaattttctaattcaataaaggtgtaatggaaaacctggcctctcagacatcacacgcggagaaaattggacaggacgctgcaatcttgccctggatcctgtcccgtattcagcgaaaagaagcgattgtcagccaaaacaaacaatatgccgcagagattctggcaatccttttacagtccaccccaaagaatcgcacgaaatttattgagctcgatggcattgatatccttctccagctgcttagtgcataccgcaaacgcgatccagctaaagactccgatgaggaagaatatgtggagaatctgtttgatgctctgatctgccttgtcgaggaagacatagggaaagacaaattcgtggaggccgaaggtgttgagcttgcgctgatcatgcttaaggaaggcaagttcagtaagccacgtgctttgagggttcttgaccacgccttgggcggagtgggaggtgccccggcgtgcgagaggttggtggaagtagctggcctgaagacagtgttcggaatgttcttgaagaaagtaagtttgctctctcgcagtcaaattgtggtatgctaatatccatccagcaagaaggtcaaaacatcgaacatttcttgggaattttcgcctcccttctccgtcttctgcctggtggttctgctccccgcatccgcacgttggccaagtttatggagaaggactacgcgaggatcgagaagcttatcaatctccgacgcgagtatgccgcacgtattttacccgtcgaacaagcgattgaaaaagaacgcagaacgtttgataaggaggagcaagaacttatggctagtgaatggctatcaaggcggttggacgcgggtttgttctcattgcaggtatgatttctcttttgcgatggcaaggctccttgctgacttgctgcagacaattgatgttattttggcgtggctcattgccgaagatgatggagcgaagaggaagatcgtctcacttcttgcggaccgtgacgaagatttgtccctgatccgtgggaccttgcaaggtgagtaatccacattgctgtaattgccggaggctaactcgagtagaacaaatcgaaggtctcggagaggatgacctgggtcacacagagttgaaggacatgctaagcactcttttgcagtttgtttgaacaatgacagaattgtaacgtatcataataccaatgctatcagcaaatccaatccacagggtcacctcggcgccagtacacatagatttcactaagatctaatattttcctcggattgaaaagttagcttgttgatatagacatgtagaccaaaataccatcacatatgtatagagatcttagtatcttaactacgctgcttcgaaattatgttgacaggtagaaaattccagctcatgtacgaccgaatcagttcagaattccgaactagaagatgtcaacatgattatatgaaatcgaagtatgaatccaagatatttaatattccttaacaggaatacgtcccattgtccgttatggagaatgggtatgtatgtacctaaggggtcagggaatgcgcctgacacaactttttgtatggataagatgaactcaacctttcgacgatcctgcgactaccacggctcgatacaattcgtcaaaatacatgatttcaaactccagtgctctttattaggatctccccttcgttacgttaccgcacaacctaacgacttgatccgtttcttgtctgtttccgtcctcgacgcgcaacacttgcgcgccgggtggcgtacttcgacacagttatggcgagtgcgtgttcgctttcgctggttgaggtcgatggatccatcgcgtagggaattgcaggcgtagtcgaggagttctggtggtgccgcgctatcatcagacttctccgtagacaatgaagagttagccgtgggctgatttcggttttatatccggcccttcgctttcgcccctggcccctttgtatagaggcagttgtcggggagacgcttgataaatctgtacgcccaattgtaaccgagcttccactcgatcttatggcgactaagaatcgaggtagcatagtcgtgaatcatgtcggcagtcattgtccaaggtacgaatccactgaattaccgcctcctcttgctcagcatccaatgctttgtgggtgcctgtacggcctttttgcgattttgcaccattgatccgaccgcgcaataactggtacggaattagattcccgcgccaatttggcgatttttggtttataattttcagggtatgatcgcaaggcaattccaatgcgatcttccaattcttgggtttatttagtcatatttggggtgatggcaatgaataaactgtggtaggtatacaaaaattatgttgttgatgaaacattgcgccaagtggcttggcggtcatggatagtcacgtgcatccacgaccatattgctagggcggtgagatatgatcacgtgcatctacctcatcgagactagcgcatggctgagaagcatccagacatctggagatcagtcccttcatcggaatattgtcggggagcctctctttcatcccccccagtttgtcagccttgctttttgcatctgtctctgactccttgacttcataacaaccccactttcgaaaactgtcaggcgagcgttgcagtgcgttgggcgattattgcgaagctcctacgccgacgcgccttgcgcttttctaccttcctacacctccgatcctcattatcttaatcaacacctaacctcaatttatcgcaaccatggtggaatacgaggagacatacgaggaggatttttacgatgaggcggacgagggcatcacctctgaggattgctggacggtgatttcgtccttctttgactcgaagggtcttgtctctcagcagttggattcattcgatgaattcatctcttcgaccatgcaggagcttgtggaggagcaaggccaggtggttctcgaccaaacactccccccctccgaagatgaagtcgaaccgatcgttgtgcgccggtatgagctcaaatttggcactgtcatgctttcgcgcccatccgtcacagaaggcgatggtgcgaccacgatcatgttgcctcaggaagctcgtctacgaaaccttacttacgcttccccactttatctcggtgtcacaaagaagattatggaaggtcgtgagaagatgggcaagcccaacgacgacgacgataatgagggcgagagtgatccaaagactcaaggtacatacctcgattgggaaacgaagcagctgccccaggagcagatgaaggaggaaacagtttttatcggaaagatgcccattatgctgaaatctaagtactgtatcctcaaggatttgaacgaagcgtcactctatgcttggaatgagtgcccctatgactctggcggctacttcgtcattaacggaagtgagaaggttttgatcgcacaggagcgcagtgcgggcaacatcgtccaagtcttcaagaaggcaccccccagcccgacaccatacatcgccgaaattcgaagtgcagtcgagaagggctcacgtatgctttcgtcgcttacgttgaagctttttgccaagggtgacagcgccaaaggaggatttggcccgacgattcgctcgacgctcccatatgtcaaggccgatattccaatcgtcgtcgttttccgtgcgctgggcgtcgtttccgatgaagatattctcaaccacatttgttatgaccgcaacgatacccccatgctggagatgttgaagccgtgtattgaggagggctttgtcatccaggaccgtgaagttgccctggatttcattgccaagcgtggatcgtcacagacgaacctgaaccacgatcgtcgtgtgcgctacgctcgggatatcatgcagaaggaattgctgcctcacatttcgcagagcgagggcagcgaaacccgcaaagctttcttccttgggtatatggtgcaccgacttcttcaatgtgctttgggtcgccgtgatgttgatgaccgtgaccacttcggaaagaagcgactcgatctggctggtccacttttggcaagtcttttccggactcttttcacgcgagtcacaaaggatcttcagcgttacgtgcagcgatgcgttgagaccaatcgcgagatttatctcaacattggtatcaaggctagcacattgaccggcggattgaagtatgctcttgctactggtaattggggtgagcagaagaaggcggcttctgccaaggctggtgtatcccaggtgctgagtcgttacacattttcctcgtccctgtctcatctgcgccggacgaacacacccatcggcagagacggaaagattgccaaaccccgccagctccataatactcattggggcctggtttgtccagccgagacacctgaaggtcaagcttgtggtctggtcaagaacctggcattgatgtgctacatcactgtcggtacacccgccgaacccatcgtggactttatgattcagcgcaacatggaagtgcttgaggagtttgaaccccaagtcactcccaatgcgaccaaagtgtttgttaatggcgtctgggtgggtatccaccgggacccttctcatcttgttacgacaatgcagaatttgcgtcgacgaaacatgatctcccatgaagtcagtttgattcgtgatattcgtgaacgggagttcaaaattttcaccgatacaggacgtgtctgccggccactcttcgttatcgataatgaccccaagagtgagaactcgggcgggttggtccttaacaaggaacacattcggaagctggaggccgacaaagacttgccaccggacttgggcccagaagaacgccgtgaacaatacttcggatgggatggtctggtacgttccggagcagttgagtatgtcgacgccgaagaagaggaaaccatcatgattgtcatgacccccgaggatctcgagatctctcgacagcttcaggctggttacgctctgcccgaggacgaaacgagcgaccccaacaagcgtgttcggtccattctcagccagcgcgcccacacctggacacactgtgaaatccaccctagtatgatcttgggtgtctgtgctagtattattcctttcccggatcacaaccagtcgccgcgtaacacatatcagtctgctatgggcaaacaagccatgggtgtattcttgacgaacttttcgcagcgcatggaaaccatggccaatattctctactacccgcaaaagcctttggccaccacccggtcaatggagttcctgcgcttccgagagttgcccgccggtcagaatgctattgtcgctattgcaacttactctggttacaatcaggaagattccgttatcatgaaccagagcagtatcgaccgtggtctgttccgcagtcttttctaccgcacctacgcggacaccgagaagatggtgggactgcaagttgttgagagattcgagaaacctatgcggattgacacccttggcatgcgcaagggtacttatgacaagttggacgaggacggtatcgttgctcccggtgtgcgtgtctctggagaagatattatcatcggcaagacagctccgttggctgctgatgcggaggagctcggtcagcgcaccaaggcacacacaaagattgatgtgtcgacgcccctgcgcagcaccgagaacggcatcgttgatcaggtgctgatctccactggtaatgacgatctgaagttcgtcaaggttcgcatgcgtaccaccaagatcccccagattggtgacaagttcgcctctcgtcacggtcagaagggtaccatcggtatcacctatcgacaggaagatatgcctttcacccgggaaggtgtcgttccggatctgattattaacccccacgctattccgtcccgtatgactattgctcatttgatcgaatgtcagctcagtaaggtttctgctcttcgtggattcgagggtgatgctactcctttcaccgatgtcactgtcgactcagtgtcccgcctgctgcgcgagcacggctaccagtcgcgtggcttcgaggttatgttcaacggccacactggtcgcaagatggtggcgcaggtgttcctgggtcccacctattaccagcgtctgcgccacatggtggacgacaagatccacgctcgtgctcgtggtcctactcagattctcactcgccagcctgtggagggtcgtgctcgtgacggtggtcttcgtttcggagagatggagcgtgattgtatgatcgcccacggcgccagtgctttcctcaaggagcgtctctttgacgtatctgatccgttccgtgttcatatttgcgacgactgcggcctgatgacaccagttgcgtgagtattccgattcttcatttatacattttcgtcacacagaaaactaaccgtttttatagaaaactgaagaagggtctcttcgagtgccgtctttgcaacaacaagcaccgtatctcgcaagtccatattccctacgccgccaagctgttgttccaagagctggcctccatgaacattgccgctcggatgttcaccgatcgctctggggtttcggtgcgttgattaggttgctcaatactttacatttgtactttaatgatcttgctggaaaaatgcgcatctgcttggcctgtttcacggcgtctcggaggatcgttggccatcgcattagaataaccggccctacatacttgaattgaatcactttacgtgtggttttcccaggagagtcataaataaacccgacaccctgtttcctgctaccgacaacccatcttgtctgtttgcagctacaattacggatcataatttacagtgaacatagatgcaggtcgtatctcattattcattgatatctcagagtaagacctaaaccaaagcatgaacaagtccatgacatcgcggcgatgttctttggttgacgagataccgtttgtcttggtcaggccccctttgggtctaggaggcccaggacagatcttgtcatcttatggcttgtgctggtcacattgaccggcgcaagataagcttgtcggagtccacgaggctggatcggatgatccagggtggacgttgtctacatcgatgtattgggatcaatgtcttcgtcttcctctcaccacaccattatcatccccgcccaaccgcagcgcgaaaccagtacacctgcggtgcgggctgtttttggtttatcattttcagaaaagaaaaaaaacacaaaacaaacgcaatgaccaagtctcaccagaccggaaaaagtcaagcgaaagaacaaatagagcaaacaacctagcgaggtccaggacctgccggagaaacaccatctaccggcggacaacaataccctgacgacgaacggcattgcgagcacggcggtactcctcatcactctcgcaatcagactccgaacagctgtcatcagaagactggtatccacagcgggtaccaccacagtcaagcttgacacggtcgcccttgcgggtgataccgtagcgctggcagcggcagtgcacgggcgggtcgctcatagacgagagcgaggaaggcgaagtcgagcccgacgacgaccgcgacgaaacagacgacccggccgagctgggcgggctgttcgagtacgagtactcgtctgacagacgggagccggcgaagcggcgggtcagctcgtcgacagtcggggggaagtctgcttcgcggagttggcgcgaggcgtagttcttggttggcttggggtgctggatgcgcgagggggacagggcgcgaccggtcacgacgtcggcgcggctggtcttcggggcggaggaccggctggtgggcttgccgccggggacatcgaggatgttgagcttgcggccggtggttggctcgacggtgtattcgacggcggggtcgtgcgatacgtggtacccgtccatcatgtagtagtaccagtagcggcctccgagttggagcatggaggtctggaagcggaacttgccgacccaggcgccgggcttgccttcgctggagagggggatctggcgttggtagttgtcccatgaaccgaccaggtggacggtcttgacgttggacgaggtccggagggagaacttgagttgaacggcggccatgatgaatcaaatgtatcaaaaaaaaagttgtttaaaaaaaaggtgtcgtagggagcagaagatcaagagtatcgtatagttagaacaatctaaaactgccagagtttgattgtcaagtcgggatattggactctttgatctttggggaaccggtccgacaaagaagaagataatcgagcgagattatattaaagggtttgttgtagatgtctgttgaacagcgaaatcaagtcgaccggcgacaggtagactgggaatagttgtaaaatccgaggaaatccgtagcaagtatatcccaaagagcacagctcgtttgagggtagaaagggtaaagaatattagaatagtatagaagataaagaaagaaacaaaagtccaggcaaccagtgctcaggataactcgaataggacagagaaacacaacaaacgctcgctgaagaagaaaaaagagaagaaatctgcctcgaggtggctatggcattcttttaagccggtcaattcgatcagcagtgcagattccgtcctggaacttgggcgcgtaactgacgatgttggttggttggatgcaagttgcactgtgatgtgctgccctcatgcctctggccaatgactggccaggatttaacgctggtggccggactagaagaggggagagtttgtgaatacgaaaggccattgtccaagcagggccagggattcgaagtctgaagaagttgtcagcctcggtagattaattgtggcggggtctttttttttgcagggtattgaaagcctaatagtataggtagaacagataagattttctggatatgaacacgcaaagtaatattcggcaatcatttctctgagcgacagattcaattgataattgaacgaaaggcaggcagacaggactaaaaataactaagtagaggggtccttaggtgtaatcgtcctcgctaaagtcatcgaaaatccagttttcttgaatccttgttctctcctccgtttccgccatatcaagagcgtccgctctcaattttctctcgcgtgcttttgcttcgtcatagtgtgcaataggtagttacccacccctcatgaccaactccaacagcttcctggcaagcctggaactgcgtatcagcttccgactgcgcccgttccagtcgcagacattcaatcaactcattatctgtaaaagaaattggacagggtgccttcgcgctatggctcacctccgcctacttactaaacagagtaactagatctgctttcaatgttatattgtcaccgtcctatgggtcactagcgtgatggaaaagacgtcgtcgtaaagtactaatcaaggtattgtaataccctagattaatatctactatcattttgatacagagatagtcaagttaacgtctgcgtagagtttctacttactagaatttttctatatctatcatatcattgaaattattattcggtaaagttgggattcgtagtgattccgaaactttattactatagttttgtagactatcgggaatagtatattaaaggaataacagaagaattgtggtatactgccaattaattatccctttgatttctatattattagaaataaatatattatttggttaaagatcgggatattatatagtaggacgttggagggctagacagtctcgcggtataagataaggagtaatctagaggtaattttatagagctataatatgattaaagtaggactaagcttagtaactatatagctctcggtaaagacgctaaaagagttcaagagtccgcctaaatttcttaagatatacaatctcttttaaggtaccggtagtaaggaccgctagagaatctcgatcttcctaagtttaggacatctcttctgaaaagcttgatctaagggatacttacatagtccttatttaaccgatagattaagtcttttcctatactataatcgtagtgaagtatcagggctaatacagaagcgctgtatcgagtctaggcttagggtaatgattcggctgtctctatccggtaaatcgtcgcagtaatagaggcttctgtttactggaaattgtaagttaaatagacgagcctccaattgcacgaattttgtcactattgttcttctctcctgttcagacaaagcataccacacatcacctagggttttccttggacaagttccataaagatatatcctgtacctgcagaatggacttcgcttgcgaccacgagagatttaggcttagtaactgggtatggaattcgtgcgacaaatcggaagccgtctcgcatggtgatcagaaaatttcggttgaagcctccttcggcaagcttcaaaaaaccaacgacgtcgtccccattctgctgtatcgctagagcagtaaggcgcttccgtccagagacgttaaaaacacgtctcctctcacgatgtctcaacctgtcattgtagctagagttgcaaatcagcagagcagcttagtatggataagatgtaagtctgcaacatacatccatcgcccagacgtgtactcgaacaaatcataaggctcaggcattttccggattatcgagacaggacgtgcgagcaatatcattctagatgtgacgacgcgtgagaaaagaagaccagaaaactcacttcgatttagatgcttggtcatggcttgatcagttgaagaatatcctgaagactttggacagatggggctttatatcgtcgcgacccttgatgcgcttctgtcgcgtaggtacctaggtgtacgtaactagttagacctacctaactagttagttactccgtgactacggagtagttgtagttaattaactaatgcagtgggggtttccagagcaggatgactaagcggccctcctgaggcttagcgcatcatctctttaaatacggagtactggatatgtcattgatttggaaactacctcttcgtgatgcccccagggagctcgcactaggcaaccgtcttcgctaggctgttgggacaatatattcgtgccttctagtagtatcccgttgttgtgtggtcgggttaccccacaacgggccgcaccgaacagccacgccagattcactttagtcttcccagcggggattaacaccagacaatggaagcctagaggttcaatccatttatcattggaagccagaaaatggatccacaagttgaatgcttgatgatcaacgtacaagactcaagagacgaaggactcgggtgaaagcatttaacgcgcaattccatagttgaaacataattaggccatgcaggcagggtataccgcaagagctaagttatcaatttttagtacagtttccagatgtacacaaaggtggcaagagaaggacttcctataacatttgaattagtatgatattgacctatttagacggtaggcaaaatctgatatgacacactggtggttagagactgccgtaggccgcagttctaaccaacacttaatacatcgtctattatccgttttcagaagcattccctctccaaattataggcagtatctctagtaatctggagtgttcgaggtaggaacaaacatctagacttcggacgttcacggcgccgatccgaagatgagtcattaatgagtcagcatacctccgacttcaaccaatttgtttccaatgataagtgtccaaatatcgacgcgagtacaggccaggcgttcatctggtcatttataatcgacacaaaaacatcagtatcaaaacaagcgcttccatcgaacccggttgaactgcacatcaccactcagcatcccggtaggagccaccttcaacctagcctgcgaccgaatccaaaatggcacacggtgcggaggactgcgcaactgttctggagcagtttgtccacgatgtggcaaatctcccggctgagctcaaccacctcatggaggaaattcaggctaaagacaagcttatgcaggaatgccgcgctacaatcaactcgcgcgacagcagcattcagaagttcatcaaactgaacggcagtctaacaccgaacccaaaggaagagccatacagcaagactattctgcaaaatatggataaatcacacgagctgcagaacgagaagatccagcttagcgagaaggcatgcgtcctccttgatcgccagatcaaacgactcgacgtgcgcattcgcgatctagtcaacgaaggtctcctcaccaacgacccgcctctcccttccctcttcgactccaaaaacaaataccgcaacccacccaaaatcttcctccctgactccaccccctccgactccaccgcgtactcaacacccctcaacccaacttccggaaacgcgaatgccatcctggctgctgcgcagcgcttgaaccaatccacagcacctcgtgtcaccggctccgcagcgcagctcggacaaaccacagcacgcagctctgcacccgccacacccgctgctgctgctgtcgtgcaccttcagcaacgccaacgcgaatcctccgccggcgcagtggacagcaagcgccgccgcttgaacccatccctcaacacccttcccgtagcctcgtcgaaccttcgccagtcctccatgggccctggtacaccgaagccgggcacaccggctggcagccgtgcaggcagtgccggccctcgtgctagcatgggcatcaagaaggcattaaccaaaaaggtcgcaccgcaccatcaagtaaagaagctgaagactgccagcggaaagccgatcaagcgctcttctagtgctagtggtcgtatcaaggcttcgaagaaatctcccaatggggagggcgatgaggatgatgactccatgctcagcactgccgatacatcggactccgacaagagtgacggtgctgctgatgaggatgtcgatgatgaggacgaggatgagggtaatgaggattcgaaggtctattgtacctgtcgcactgttagtcatggggatatggtggcttgcgacaatgatgagtgtccctatgagtggttccactggaagtgtgttggcttgacgcgcgagccggttgggacttggtactgtgacgagtgcagacgtactctaggcaagtgatcctgttctttttctatgatctgtatgacggtttatatacccatggcgtttctgtacttgttgggatggactggacaaagatatgtacttcttaccaattttactgcatgatttaaatctgcttcgaaggaatcaatttcatattctgcccattctagacaaaaattgatactaatccctaagggaaaaggatgacaagaagcagaaatcccaccctaggtatccattcccagctatagccaagcgtatgtccaagccgtgcccatccagcgcccaatatatccccagggtcacagggagccggagcctaaccaaatcaagtcgaaaacgccatcgctatgcacatgtcccctttttttttgtttcttccatgcaaacatgttggcacacaggcgcacacagtgcgccgaaagtcagaaattagatattcgtggaaaagccattgctcgccaatccactcaaaacccaagcccattgttcagccacggatcgaagtactcgcaggtctcggggcttaccgcgccgcctggcgcgcacaaccggaacactgggcactggccgcaaggggcttctgtcatgccgttcttcacgaggtgcttgtttgcaacggagagatcgtcgccctcgatgggcggcttgcgggactggttcgcttttacggcgtcggggcttttgagagatctataccactcgccgttgcctaatgcgacgagcttgttgtcgtaacagagcatttcgaggagttgcacaacgctctcttcgcccaggcggacaggcgtgatgccgctttcgttgactgccgaggcgatctgcgccacggtcgggtatcccgcgtagccgtgggggtatgggaggtaggttttctcatcggtcttgacgtccaccttgccagaggcggttttgatgcgcttcttacggtctgaggcggggacttcgtaccagcttttccggctcacggtgtactcgatgtaccctgcgacgctgttgatgaagttggcgtccagtacaccgtccgtaaaccaggctcctccggttacctcttcacttggagcaagcccggccaacatgtacatcttgcggctggggtatttcacattgtggagagatttgatgtagttttttccttcgagggatttcaggcatcgatcgaggatcgacttgtgcaggttcgtgcggtttccaatgtgccgcacccagatgcctgttcgttctgtggagtggatgacattgtagaccatggcctcgtccggggtaaggttgcggagcctggagaggaggaggggttagttatgtgctttatcgactgagatgtgtctgcaattcctacttctcggcatcctcgcggtcaatgagcttccatgtgagctttccatctttttggaggaggcgaaacagattttgattgacgaggctctgggtgcattctagcagtagcgcaacgtcgttctttgggatcactttgagattgaggaagtcgttctgatagaacaagtgatcggggtcaaactcattcacgcatgcatcatagagctttgaggcaagctcggccacttgggaccccgcggaggccattgttggagatgcgacggagatatcaggcaaaatcaaggttcattcgaagaggctcgtgggttttcatgttcaaggaagtgtgctagagccagggagtaagttagaggaccatggtgcgtcgatgtcggcaaatttgagtcacaaaagaatcacaaatggtgttttttttggcgactttttctcggcggggaccgactttgacccaaaagggtttagccccgtgaagcttcaagtgtcagcgtccgtgcctgaggcttaataattcctgcctgaggcagtagatagcaacggaaatttcgagaagctccggccgttgagctcatgacctcagcactttcagttccttgtgatcttatttttgatctgcatttctcccttttctgagcaatttagcatatcactacaaaatggctgacgctttgaaggcagaaggcaacaaggccttttctgctaaggactatcctactgctatgtacgcgctaccccacctttaacactgtgacttcgtcaaagcagaaactgataaaaccagtgagaaattctctgaggcccttgctatcgaacccgaaaaccacatcctctactccaaccgctctgccgtctactccgcccagcacgaatatcaaaaagccctcgaagatgccgagaaggcgatcgagatcaagcccgattggtccaagggccatgcccgcaagggtgctgcgtaccgcggcctcggagatctgtgtacgttattctagttgtgcccgaattggtgggataattggcattgtgacaaggtgctaactgatggcagtggctgcgcatgatgcctatgacgaggccctgaagatcgagcccggcaacgcacaggccaagtccggtatggaggcgacccagcgcgccatcaatgcggaggctaccgcagatggtgtcagtggtgacccaacaggaggtctcggtggaatgttcaacgacccggctctgttccagaagttggccaacaaccccaagaccgccgccctgctgggagatgccgagttcatggctaagctgcagaagatccaacagaaccctaacagtgtcggagaggaaatccgcgacccgcgcttccttcaggttatgagtgtgcttctcggtattgatatgaacttcggtggcgagggagcggagcctcctattccttctgctaaacccagcacctcgcagtccaagaaggagcccaccccggagcctgagccagtagacgaggaggcaatcgccaagaagcaggccaaggaggctgctgatgctgagaagaagattggtaacgatttctacaagaagaagcagttcgatgaggccattgagcactataccaaggcttgggacttattcaaggatatcacctacctgaacaacattggtgctgccaagttcgagaaggccgattaccaaggcgcaatcgagatctgccaaaaggctaccgaagagggccgcgacttgcgtgccgacttcacgctgatggccaaggcctacacccgaattggttctgcacacgagaagctgggcgacctcgcgcaggccatcgaattctacaacaagtcgctcatggagcaccgcacccctgataccctgaccaagctccgtaacgccgagaagaccaagatcacgaccgagaggaacgcttacattgaccccgccgaggccgagaaggctcgcgagcttggccagcagaagttccaggaaggcgactggcccggtgccgttgacgctttcaccgagatgaccaagcgtgctcccaacgacccccgcggttactctaaccgtgccgcagccctcatcaagctcatggcattccccggtgccgtgcaggactgcgacgaggccattaagcgcgatgccaaattcatccgcgcgtacatgcgtaaaggcgctgcccttatcgccatgaaggaatacaaccgtgccctagacaccttcaccgaggccgccgaccacgacgacggcaagcacgctcgcgagatcgagcagcagcagcagaagtgcctggacgcccagttcagcgctcgcgctggtgagaccgaggagcagaccatggctcgtatccaaaatgaccccgacgtaagatctaatttcccctgcaccggattattcagcatgaagtttactcacattttctccagatcatggccgtcctccaggaccccgttatgcagagcattctccagcaggctaagagcgaccccgctgccctgcaggagcacatgaagaactcgcaggtacggatgaagatccagaagctgatggctgctggcgttatccgcatggggcggtaaatgctataagggtgtagagcattcgagggatttgaatacgaattgacacgatatatttttgccagcatatttcttagtttctaaaattccattctgcttatatgcatttaatcttctagagtagtagccagccagtagtgatgcttcctgtaattactgcaaatacaaggttgtatgaacgagtcctcgcgaaacatgtatcctctcagtcggcattgtacggagtactccgcacgatatatatcagccacaatatatagtagcagacaccagccccaacatacagacaccagccccaacatacagacaccagccccaacatacagacaccagccccgacattaatatacaattcttataaaacctcggcctcagctcgggcccgtggtcttcatctggcagttctcaagccgaaaaaatgaaaaaaagacaaaaaagacaaaaaagcgccacacaagtgggcgagtgggggttcccaattagagaaccacaagatctaaccgaactactttatctaccaatcataacatgaccattgaaggattcactctcttcgtttgtgttatatattgttgcacagacacagaatatacccgatacacacagctgggagtggaaatagcccctcaggaccaaatgcaagtctagatgtgatatgatagatcaattcggcgtgcagcacttggcttgtctatcgctgagtatttaggttgtataatcgtacaatatacgtactccatcgaggttcctcggtaaagaatacccattctccatatccaaggaacacctttggtggatacacagagtagacttggccgatctacctaatcgggattagggcacgatgcgaggtcgatagcgtgcgatgtgaccaagtttttcattacattctctggatgcatgccacgtgtaccttaagagctgagagtgttctaggtgaagtacgtagacaatgacgacatgccatatacatatactagttagtataagatgcccctatattgtactccgtacgggctgcatatcttgttgcctagacaggtaaggtagggctagatcgatagcctacaaagtacaaagtactagatccgcaaataaaaaaggggcattgaacccaggagatgcccggagtgccctagagccctaagaataactagaatccatggaaatcggagtttatcccctccattgaccctctactgaccctctacggagtattgctgaccctctattgaccctctgtggctgtgctgaaagctcggagtttagcctgtcattcccctgacctcctcaattgacggattttgattgtactagacaattgaaccggtacggatatagtcttgtagaataacctcatagactcatactccgtagactcagatgtgttgtatctgctctctatatgctaaagtgaggaatctgacccagctccgacgtacgtcactgatcttcgatcgacctcggtgttcgcgatctccgatctccccttttcgctctcttttctttctttttattgggctttcaattctcggaattaataatttacctaaagatatacataaggtatttaatagaaatatccattggcgtatcgtaaagaattccagccacagttccccttgacgcaagcggctgggcaacttgagctgtgcctttggtcccactcctctcctcttccaaggttctcttgtttttctctttctcactctctcgatcactctgtaccctggtatacaatagcataccaggccacctcttcgactacgacctcacgcaatcccggtacgttaattggtagacctgcgcaagtcagcagtcagcattcttcccctcaccccaggttccgctgaatccaatctgaccaccctctagaatatccccggctctctcaattccccccgaccagaacacagcaccaaccggcgatatggcgtccgccgacgcggctaagacggatatgaggatggagggtaccatcgaggccgcccaggaattgcaaaaggacccggaatcacaggttaacccggatgtcgttgagaaaatggcggtcgacgaagcccaaaaggctggctcggctgcataccaattcgaccccgatgccacgccagaagacaaggccaatgctgctaaagcggtatgtgtcgcaaaaagtccgagttgtgttcggcacaatcaccttgctaactggcatttcgtctagcgattgccgcctaattttcaccatccccatcaagccaccggtgttgctgtcctgacggataaggtgaggataactggttttcgcgatgcgctttcaatctacatcctaaccctacttagaccgacggcaaagcagactatgatcttcctccaccggaatccgcgaccgccattttggccgaggaagccacacgagaagatgcgggtgagaagcccgtcgatgaggatcttcggtgggcgcgcgacagaacgggttgggccccaaagttcgtcgatgagaagctcgcggcgattttggccgaggaaggcacattgctggatcacgagacatttttggagggaagaatccctgataagttctttggcgactggtatcataattgcgggattatcatcttcgcctgcctggcctcatggattgtcgctgttctaggcggtggtataggctgggttcttatggtcatggcagcatgcagcacctactaccgtacctccattcgacgagtgcgccgaaacttccgtgacgatatcagccgtgaaatgtccaagcagcgtctcgagactgacaccgagagcctcgagtggatcaacagcttcctcgtcaagttctggcctatctacgcccccgttttgtgcgacactattatcaacaccgtcgaccaggtcctcagtacttctactcctgccttcttagatagcttgcgcctcaaaaccttcattctcggtaccaagcctcctcgcctggagcacgtcaagacctaccccaagactgacccggataccgtcatcatggactggaaattcagcttcactccgaacgacattacggatctgacttcgcgccaaacaaaggacaagatcaaccccaaggtcgtgttggaggttcgtgtcggcaagggtgtcgtgagcaaaggcctcgacgtgattgtccaggacatggcttgcacgggcttgatgcgtgttaaagtcaagcttcagattccattcccccacatcgagcgtgtggacgtctgcttcctggacaagcccgaaatcgattacgtctgcaagcccctcggtggtgatcaccttggattcgatatcaacttcattcccggtctggagtcctttatcaaagaccagattcacgccaacttgcagcccatgatgtacgatccgaacgtgttcccgattgaaattgctaagatgcttgctggaaaccctgttgaccaggctatcggtgtggtcgccattactctgcacggtgctcaacagctcaagaacccggataagttctctggcactcctgatccatacgccgtggtgtctttgaacaaccgtactgagctcggccgcacgaagaccatccacgacaccgacagcccccgctggaatgagaccatttacgtgatcattacctccttctctgatgccttgtctattgctgcgtatgactggaacgagtaccgcaaagataaggaaatgggtgttgctagcttcgcattggacaaacttgagcaggagcctattcaggaggggatctatctggaagtgcaggccagtggccgccaccgtggtgctattcaagccgatatccgcttcttccccgtcctcgagggacgaaagaatgaggctggagaggatgaacctgcccccgaagtcaacaccggtatcgctcagttcaccgtggagcaggccaaggaccttgacggaagcaagagtctggttggaaagctgaacccttacggtgtcctgcttctcaacggaaaggagattcacattacgaaaaagctcaagcgtaccaacaaccccatcttccagaatgcttccaaggagttcctcgtcacagaccgaaagaatgctcgtttgggtcttatcctcaaggacgatcgcgatatcatgcaggatcccattatcggccgctaccagatcaagatgaacgacatgctgaagatgatggagcgtggccagcaatggttccatctccacggtgccaaggagggacgcgtcaagttgactctccactggaagcccgtcgagctggggggcattggcagcgctggctacattgaccccattggtgtcatgcgcttccacttcaagcgtgcgactaacctgcgcaacttggaagctatgggcaagtctgacccctacgttcgcgtgctgctttccggtgtgactcgcggccgcacagtcaccttccgcaacaacctcaaccccgaatgggacgagattgtctacgtgcctattcgcagctcacgcgagaaggtgactgtggaggtcatggacgaggagactatcaacaaggaccgaactcttggttggtgtgaactcaatgcatccgactttgttcgcgaggcggagagcggtggatatgaaatcgacgacgagaagcaggatatcaccagcggtctcaagatcagcggcggctctcccaagggagaaatcgtctacaatgtctcgttcttcccgtctgtgccagtcgtcaaccccgaggacgaagctgaggaggaagaagaatccactgagcttcctgctactcctggtccggactccaccgaattcccgaagaaggctttgcactcgaagtctgctagcgttgactcgaaggcctcgaaggcctcaaaggctgtgtctaacagcgctgcacccgtaactaacggaactaccaatggcgagcccgctactaacgggcgcaccagtctcgaaaccactacatcccgcccactcacaagtagccagtctgaaaccgcgtctgttcggtcggttaaatccattccccgcacttttgtctctgcggaggatctcccgaaatatggtatgttttgcttcgatattcacgggaatagtacaaagctaattgaccatagaatccggtttcattgtgttcaagttcctcgagggcaagctggccgttccccatgtccagttggaagtattgatggacgattacatgttcccttcatatgtctcatccaagatccatacaacgaccgcacagttcaccgacgtcggcgaggcattcgttcgcgaactcgaattctccaagattacgttgcggctcgtcaacaaggaggatcccaaggactccagcgaggagcacacagtcgccaagctgactggtgacacactgcccacactgatgcgcatgctgtacacgcccaccgagcttatcctccgctccaactccggcgaggtgagcaaggtcaccgtcagcgcccgatacattccgacggaaatgaagctcgacccaacggagagcatcaacaacatgggcaccctgcgcgttgacgtccacgatgccgctgaactacccgccgccgaccgcaacggattcagcgacccattctgcaagttccgcctggacgacgagaccgtgttcaagaccaaagtccagaagaagaccctgcatccagcctggaacgagtacttcgaaacccccatcaaatctcgcatcggcgcaaacttccacgtggatgtgtacgactgggactttggtgataaggccgacttccttggtgctacggcaatcgacctggaatccttggagcctttccaagcgaaggaagtgactctgcccctcgacggcaaatcaggcgcaatccgcctgagcctgctcttcaaacctacctacgtgatccgcgcccgccaaggctcctctaccttctccggcaccttcgccgtccccggaaagatcgtcggtgcgcccgttaaaggtgttggtttcgtcggtggcaacgtcgtccgcggcgcctcattcctaaagcacggcctgatgtcgcgcatccacaaggagaaaggcgaagacaccgcctccattatgaacagcatcgaggaacctgactccgtcaggggcgagcggttgaccccagccgcctccctcgccgaagtctcctcttcccccgccaccccgcagaaggaacacagccgcaaccgcagcaccgcctcgcagttcggcgatcgcctcagcgtcttcggtgggggcggctccggtgaaaagggcaccgccaacatcactgtcgtttccgctgctaacttccccaacgactccaatctccgcgtcatcatccgtctccagggttccaagggcgccaaggatgtccacaaaacgaaggctcacaagaacccctctggctcagtcacctacgacgactctttccgcgtccccaacaccaccgccgacgcccagtaccaggttcgtgtcgtcaaccatgccacgttcggctcggacgatgtcctcggcgaagcgccgttcttcgttgacgatcagggttccgtcgccggccaggataaggttattaccgttggtgacggtgtcgttaccattcgctccagctttgcgcttgcagatggtggcttgagacctactacgtcacactcgaccggaccccccgatgtcagtgatggtggagggagtcctgattcgaaaaagacgccccgtcgcagcttcttgagtaagagggctgttagcggtgtctaaatcactcctttactcttattatccgctttggaattcctttgcctgttcatggtgaagagtatatgaaaatatgaattgtttccgcatgttactaattgtgttttgtttgtgcttgttgtgatatccttttcttctcgtttttttcccactcctatcaatatgaattcaattgttgagatggccccggactccttgagacatctaccacgtagtataaaataggcgagtaaaaatagttgagaatcaatagtttgcgccacacaaaaagaccgagaacaagactgagtctgagacctgagactgagtctaagacctgagacatcagtctcaggttggtatcttaaaggggcttccgataaggatatactcgtatttcatgtggtatgcccattgcattctcatggccttatattaaactaagattggtctaaggccttctctgcatcccgagtataatttcccgaacttggtctgcacagcctggatgatctgcactttgatgcttcggcctcttggagtgtttagtgtacccgtaccgtagttagtatgttgtactatgttgtagtgtagtgtagatatagatggtagtggtagggatcgggaatactacataaagatgtctgatattcagcattttatttttagatccagacggagtacggagtatattaacctcatttatttagaagaggcgttgtggagtcgataatttaccgtcccacttgcagttgccactttgactggaagttggtttgcaacatacaatataggaaatactacaacatatgggatgcaattagtactagtctagatgaatttgaatctatatttgctgtactctgtagtaggaattgtgataatagggatccaaggtgaaaattctacctgcattctgtgctttgtactacagacttagcgatattgtatattgtcatataggtcaggtgaacatcatcccgactatgcatctatattctatcttggaatagcacataattaggcgaatcggccgaggtttgttcgaaacaattgaaactgaaacaaaaaaggagaagagcttgtatccggtggggcttgttcctatttgtagggactagctctcctctaaggtggggagggaaaaggggtctggattgttagtggacttgtgtactccgggcttaggggtatagtggatgatgaatggttctgatggcaatcctgtctaactgacacttcctacgcgtaggcttaatagcaacgtgcatgtcggtgctggttcccgagctccagcccgtgggcatgtcagtggctggcaactgacgacatcgggatgtaaggaggactgagcgagataagagaataggaatgggggatgacagtctctagagactctggaggaagagacacagtaggcacagtaggaagaacagagaatgcaggagacgatccgcagattatttatggatgttggcatataaagtggacgtaaatacccaaatcggtgcaaataacaaatacattctagaaatcacggggtctctctcccccactccatctcccttttcttccctctctctttcgtttataacctctggacatcccctctcctccccctcttcatttctgtccttaggaattgatctgtgagttgtcctccatccccgcccaatgacggcagcttgacatccaatggatcgacaaagtggcgaaccccctcctttctgaggcagcttgagttgagcttcttaaatggagccacgttgcccttttcttccttgaatctaccactgaccgtcgatttcctttcacatagccagtttcctccgagtccatacccatatctcataaaccataactcataatggcctctaaggctcttcccactcaccttcgagcccctgtcgaaagcgagggctttggtggaaagcaccatggcaagtcgcagtcgcacatggtaagttctcttcaggcggtgaacccttgaatctccgcatcctgaagcttcgttcttgcctttttggattgttcctgccgtttttgggttgttttgctgcgctttcctgcgctttcctggacgcgtcttgacgaggccacaacatcttcctcttttgctcgtttcctcttctcttcccctcttttcttccctttctcatccatcgctacactgttatcattgctcgattgcttgtattttgagaagccccattcaattgtctctatctatccctttccttatcatggctactttggcccccccatttggtccagagctgacgcgtgaaacctccaaccaggcatttgagaatgcctccactagtgtcgccgcctcgcaaatgcgcaatgccctgaacgccctcggcgacagcgtcaccgaccccaaggagaagaagcgtttcgaagccgagatggacaactttttcgccctgttccgccgtttccttaacgacaaggccaagggaacatccgtcaactgggataagatcgcccctcctcagccttcccaggtggttggctacgatgacctcggtgcggacgcctccgtagagttcctgaacaagctggctgttgtcaagctgaacggtggtcttggtacctccatgggttgcgttggtcccaagtccgtcattgaggtccgtgagggcatgtccttcctcgatctttccgtgcgccagatcgagcaccttaaccgtaccttcaacgttaacgtgcccttcgtcctgatgaactccttcaacaccgatcaggacacccagtccattatcaagaagtacgagggccacaacgtcgacatcatcaccttcaaccagtcgcgctacccccgcatcatcaaggactcgctcctgcccgcccccaagagcttcgactctcccctccaggattggtaccctcccggacacggtgacgttttcgagtccctgtacaactccggaactctcgacaagctgattgagcgtggtatcgagtacatcttcctgtcgaacgccgacaacctcggtgccgtggttgatctccgtatcctgcagcacatggttgactccaaagccgagtacatcatggagttgactgacaagaccaaggctgacgtcaagggcggtaccattattgattccgacggaaaggtccgtctactcgagattgctcaggtgcccaaggagcacgtcaacgagttcaaatccatcaagaagttcaagtacttcaacaccaacaacatctggctgaacgtccaggccatcaagcgtgtcgttgaggagaacgagttggagatggagatcatccctaacgagaaatccattcccgccgataagaagggtgaggccgatcaggctatctaccagctggagaccgccgtcggtgcggccatccgccacttccacaacgcccacggtgtcaacgtgccccgtcgccgcttcttgcccgtcaagacctgctccgatctgctggtcgtcaagtctgacctgtaccgtctcgagcacggccagttggtcatggaccccaaccgcttcggtggtgtccctgtcatcaagctcggttccgacttcaagaaggtctccgacttccagaagcgcattaccagcattcctcgtatcgtcgagctggaccacctcactattaccggaccggttaacctcggccgcaacgtcaccctcaagggaactgttatcattgtcgcctccgagggcagcaccattgacattccccctggatccgtgcttgagaactgcgttgtgcagggtagcctgagaatcctcgagcactagatgttgtcgtctgattcttgtgtcttgcctggtttgcaaacccgtcgcagtctttggtttttctcgttttaacggtgcatccgaggctatggattccacggagtattcaaaggaagtacttgtattacattacaataatccagcgtcttttttctttcttttctattgggttgtttttagtctagacctgactttgattcccaagtactgtgactgttgctccgggccattctcaatgcaccaatacaagcttgttcatctgcaaaagatctctacatgtatgtagataatgtagttgtaattgtatgcctacgcctcggtacttttatccgctatcaattcgatatatggccccaagtagaacacctacacctcatttagcctcgatatcacgaaacccagcttcgaatccgtgcaagacactgcaaacatgaaatcgccattgccttcaggcaaatgaacacctatcataataggcgggggaaagttccccatgatatactcccaacgtcattcgccgcagaataagccctactaaaccgtatcaaagcagagggggatctcaagtaaatcgtcctaccatcattcgaaacaggaatatactttgcaacaatatgcattcctgatcttgtacagtgtcaacattgtttatttgtatattgccaacagtacatatttgactgtatatctgacgcctttttatatattgtttttttttttttttgacatacgcttcttcacatattggacaaatatcctttatatatttgcatcttatatgctacattttacgctcgaaagaaacgcaaacgcaaaaggaaaagcacaccgatatccacctgctcatgtcggtatgagtgggcatcatcgccgtcttgtacccggtccctcgcctgaggaggaggaacatgaccacgacaactaccatgaaaatgatcttgaaaatggcagtccactcaccgaggaaggtaagggttctggtacgtggaagaagagagtttcgactgcgtgtctggcttgtaagaagtcgaagaggaaggtgagatatatgatacactactctacactacatctacacatatggatataacaaccaactaacactctaacgcagtgctccggcacatccccctgcgcaaactgccaaaccttcaaaagagtctgcatcttcgacgaatctctcgaccaacgccgacgcgtagccgcaaaacgcacagcagacgagctctcctaccaccgcgacctcctctccgacctcttcaagctcgtccgcgaagcaaacgaagctgacgccctccatctcctaacgataatccgccacaatgcccccgccgatgaaatccgcgcctacataaacgaaacactcgcctcgatcacgtcaaccactgatacatcaacatccacggcgcacaagcaggaaaccgtcgcgaagctggaggatatgcgccagcttctcaatgtcgagggtacgggtcccactttcagaaggaaggttatggatatccattacctgtgtgactcggcgccttgtgaagtgcctgcggcgccgtggacgagggttactgctgatgcggatctggtgtcgcatcttgtttcgttgtattttgcgtgggattggccgtttgcggctattttggacaaggaggtttttgttaggcatatggcgaagggggtattggggtcggagttttgtagcccgtttttggttaatgcggtgctcagtaatgcttgtgtgggtatttcctttttcactttcttttgctttgaggtttgctaatattcggttgctgatctgtttgtttagtacttctctgagttctccgaggcttatgttgttcctggcgatatctcttcaaaagggagtggttttcttgccgaggcagagaggttgagaggcgaagagaattcgcagcctagtttggcaggtttacaggggacgttgttgatgtatgagaggtttgtatagacatcttgtcctagtggctagggcttttctgacaaagatagatatgcaatgtcccgcgaagacgatctgggctatatcatgctgcaccaggctatccaaatgggcgaggcactgggtctggtcggcagcacaggacctagaatagcttcggcggagttatcccaagacatggatatctcatgcaagcgcacagcttggggtttgttcaacgtcgacacgtgagtgaatactgctagcatcccacccttcgaactcacactcacacctgcagcatggtccacacatccttcctgcgcccaagtctcatcgatcacgtcaacatggcccgtctggatatcaaccagcccgaagacaaagccctctggcagccatacccaacccatcgcgacccgcgcctgtcattcttcagtcagtacttcgacgaagcatgcaacctgtcaacgatcgcacgcgatatctcccgcaacatgttcgcagaccacaggagcaagactggcctcggccctatccaccgccagagccgcgaggatctgtacgaccgtatccgtcgttggcacgatcttctcccggaggactttgatgtgcggtataggccggctccgcatattatcttgttgaagtgagtagcatgtccacattaatccgtcttgtctaccgaaaaaaaaaagcaaaaatactcatcctacacagaatgcgctaccacgccctcatcataaatctcttcagctgcatttccgaagatgaagtcccgcccacacccttcgagcccaaaacaccggaaagcccgccgcgccatactcccgagagaaaatataacgcgcgggaagtaacgcagagcgcggcccgcggcatcgctgccctaacgcgtctccacagacgtgagttcggggttagccgcgcgcaccagtttgcgatgtatgcgatcaacctggcgctgtttacgctgctcgagcaagactcgtttgatgtgctggatgaggatttcctcattctttcgagtgcattctcggttgttgcgagtcgatccgcgctggggaggaatctgtttcatattttccgacagtcggtcagggcgaaggcgcagggctatcgtattcgggagagttctgtgcctgatgagttgaaggatttgtttgacgaggcctcgaaggaaagggggtgtgatcgatttgatgagtatgctgatggacttgagaagttaaatcagaaggaaaagtatcatgggattggagatgggaatggtaaagggttgcaggattatcctggacttggactttccgatatgttggatcgatatgagagtctgagtcttgggaaggatgatgttctggttgagaggtatcgacctgttggatgttgatgggagaccgcacgatgcactatcctcggcatcctcgtcatctcggtcgtatgtctccaggcacatttgccttcacagagtggcgacacggttgtatgaatttgctccatagatatagatcgtccagataagttgataagttcagggggatgtataagctgacaccaaggaggaacaccatagaatgcgacagttaccgacacgtcacagctaattatggagtctcagatccccaagagttcataggtaggagttggttgacttggaggttggctgaggttgggatgttgtctgacgtcaaatcggcagttcatccacccgccaagtgaatgtcatctccacgctcgtccactttagtccaacttcgccccagttgagatatttgacagttaaaacattggaaacaaatcatcaatccttgttttcctgtttgtgctggaatgtttttgccatggctttgttccgcctttcttaccttgtaccctccctcttcaaccctcggtaacatatattcgtgtcaataatctcgataaatttgataaatttgatatggataatcatgacctaactctcgaggactacgtctcgatgtcatccgtacctggttatatacttccacaaccctatcctacgcctatccctttctcgccaatacaataccctgcacaagccttctcacagcatatgtcaaccccgtcagcatccggaagtactgctccaaaggtagccattcctagactgacgggttctgatacctttatacacgggcgccgacgggcagcgcgggcctgtcagccctgtcgccagcgcaagatcaaatgtgatggtatccgcccgtcgtgcggacaatgtgcatatcacaattacggctgcaactacgaggaagtcaaacgagtgcgggatcagaaacaactaggctccttggccaagcgagtggatacatatgaagctcttctgagagacctcgaagccgaggtggacccccccacagctcgaaaaatcaaaaaagcattgaaggtatgtccagtcaatatcagatgaagttgcgggtctcacccaagactcggatcttatgatttgagtcccgagttcacgactctgaccgtttgccatttggcaaattaagtccaaaggtgtgaaaacccctagaaagagtttcgactccgatgattcctctacctctatggactcactcgatgctatcgaccaggttgacgaagacctcgatcggaacgcggacacccgggctgcgggcttctttgggaagaattcagaggtcaattggattcgcaagctggagagcggcgtggatatgaagagcgcacaggaacatgtggcgaatcattctcaaacgcaaagtgatcgtgatccagcctttatgcagcagcaacagtcattggaaaggcagattcccacttctacgatggattatcatctcgacaatttggacattccgatgattgaaccatgtgacccattagctttgcccccgtcggcattggcagaccgatacttcgatgcctatctgaccaacgttcatccgacattcagcgcagttcggaagatgaccttcatctcccagtatcagaagtttttcaacaatgaatcgacaccacaccggaaatggctggccattctcaacatgatatttgctattggttgtcgctactctcgactcataaatgacccccaaagcactagtgaggaggacctgatatacctgacccgggcacgccatctcggtctgcagggcagtgtgctattcgagcccactgacctccagcagatccaactcgaactcctcatagcaatttacatgctttgtctgggacaggtcaaccggtaggttcaatcctttcaccctccattccttctgcatcatactaattccctcatctcccccagagcatccaaattctccaacatggccctccactcagctatatctctcggcatcaacctctgcataacagacgaccgcaccaaagaagccgccaaagaaactcgcggccgactctggtggtccatatactccctcgagcaccttcttgcatcaatgaacggccgggcctcctgtgtcggcgaaggcctctgctccgtccctgcacctcttccgtacgaagaagaaatattcgatcaatccgacgctaaacgcctcctccaagatccggccctccgcgaagcccaactccgctccaccattttcgaaagtcccagccaacaccactcgccctcattggtgacctcctgtctaccctgtccatccctcttcttcaacttccttgtcgacctaaccctcatcacccacgccctcatcaacaaagtctacagtatcaggggtctccgcaaaggcccgagccagttagaataccacgtccaaaaatccagcctacaaatggaccgctggctctcaaaactttcccccttctacgaattcaccattccaagctccgatccctggcacctaaagcacccccaactagacgacctctccgcgcccttcgtgcgcgaacgcgtctgtctagcaatgaactattactccgcccgaatcaccctttgcagaccatgtctaagccatatccaccaatctccccgccacgtctcaccaacaggcgatcacgctgcgcgcgaaaaagcgcggtccgaaagggccacacactgtctgcaagcttcctgcgcactgatctccatcttcccagaagatccgaacattgcatggctggcccgcaccacgccctggtggagcattctgcatttcctcatgcaggcgactacggctatattgctgggtttgtcatgctgttctgactcaaatacgcccaccagcccggaccatgcggatccgctcctgacacctgttacgccgtctatatcccagaccggggcttactcgccgctgctggagaaggatttgactacggctgttgcggcgactaagaaggccctcgcttggcttcatatgactgcttctgtggatccgtcggcacgacgggcatttctgctttgtgatgggattgttagaaagattgcacctggcttggggattgatttgacggagtggccggatgggagttcttttgagaggttgatggaggagaaggagataagtggacatgggaattggaatgtagatagtagcggaagcaatgagcaccacagtgggagtgggatggaggcgtatgatgagttggttgatttcgacggaggtgttttttagtttagtttgagcgtgatgtcacttttatatctggatatacgatgagaatatgattgatgaacaaatgtctacacctaatatatccatatgccactttaagccgacgctagcaggcagtcattgagaggcgcatgttcaaagttttagcatcctggacggatgatgctagaatcgctcttaatatcaagtcacagtcacggagcgactatctggctagtaaggattgggaggcaaagaagcaaccggtaacttggtctgagaataaacggacctaagccaagtggattacgagcagcaggaccccaagcttgaacttgaggcacgggaatgacagtgctagtacggatgagattcagcgcagtcacttccatagcgaccttctcgtcggcatagtcattaagtgccatccccacacaaaggaaacgaaccatccaggtagtattatcgctaaagaccatcttcataccggcattgaatgcgccatggtgaaaggtaccgtcaagctggcagggaagcttatcaggatggaaagttgatacccattgacagagatgactcattctgtaggtttcattcaccctgtcaacccaaatctggccttgcacctcgtggacgatatcaataagcgcgtttgtatccatgacatcaagcaagtttgagggttgagacgagtacgagcaccggacaagtcaccgctaatttagcatgaaggaaatcatattaatccgtgttaatccgctttttgacattccatctgctcagagggtcttgtcgaatgtcgagatctctcatttacgctagttagttagttagttaacgtaatcggtaagcgagtggccactgtaagcgagtggccaccccacccaagaggatatgatcttatgccctgtctttccacacccactacaccttggtgcagcccgtggtcgtggttctaaccctgattgagtgcttccgcccggggggtgtaggggtatttctaatgcttccaccagcctagcaatgatttcagaagcttcttgaactgagaggccttcttcggcgggtatctgccgtctagatcgggcccgcttttgcttcttattctcattttcatcccgtaaatccttgttttctttcgctagtaaaatagcgctatgcattgcaagctcgcagcctttgataagttggtttaatgcacgtttagaagggcttattaggcttcgagattgggttcgaagtaaagctttaatagacaaagcctgtcgacgtagatctttgctattaaaaggggtttttggggtgaaattccggcttaaatcgctaccccggcttagggggggggttagcgttcgaagataaatattgagttttgaaagtacccgatcgggtaaaaaaggtattaaaccagctgctgagaagctatttttaatcgtctccgatttaaaagcttcaattcgtacagaggggtatacttcgaggaattcaagtttattaatatagttgatcccagtctgcattttcatctcaactaaccggctgtacgaccgttttaccaccgcaaaacaactgatatcgagaggttataaaaggtgagaggaatacagtggtatacaaattggtataatatcgttttccttataaatttaatcgaattaaggggttaaatggcttctgtagccattgagtactaaaagtcgataccttcctactatacgcaataaagttaatagtataaagagtttctaaagccagcgaagtccaatttcatctaatatccacctatttggactaacttcaaagcgccagttactaggaaggccttcgaaccataatttaaggaagaccttacctttaaaaataatatatagagggaggacctatcctaccgcgtttatacatttaattgcagttacctactcgcgatttctaggttgtaaaagtaatctccaactgtagtatttacttcttattataacctttgccgttatagttaatcctattataaatccagtctcatcgaagttataaatatcatctaggttaatcccaaattaaataatagttttttaaataagattaaactattctccaatgatttttaggtctttacacttcgcgcgcttataattataacatcttaagaaccgagaggaaagaagagggcgttgttttatgaaattgtaaacctatttttcgctaaccaaaatgactagggtagttccgcgctttttaagaagaagattcgccatttcttataccatagagggccggggagctgatccacgagaatccatagagagaatccatttttgaagagattcctcttcaattgtagtcaatttagtcgagttggcgcgagaagtcgcgcggcattgtattccatcgaggcggcgccgaagggttgaacgcgggacgttaaaggtacgggcggcaatagaaatattggtaaattcttgtttcttaaaagcctggatagctagtaagatcctaccctcctgctctattgaatctttagaggattgagagcgaattggtggcatggtgggtggttgaactaagtaagtgctaattcatggacgcgtttttgggtagggtggccacccgcttaccgtggccactcgctttccgannnnnnnnnnnnnnnnnnnnnnnnnnnnnnnnnnnnnnnnnnnnnnnnnnnnnnnnnnnnnnnnnnnnnnnnnnnnnnnnnnnnnnnnnnnnnnnnnnnnnnnnnnnnnnnnnnnnnnnnnnnnnnnnnnnnnnnnnnnnnnnnnnnnnnnnnnnnnnnnnnnnnnnnnnnnnnnnnnnnnnnnnnnnnnnnnnnnnnnnnnnnnnnnnnnnnnnnnnnnnnnnnnnnnnnnnnnnnnnnnnnnnnnnnnnnnnnnnnnnnnnnnnnnnnnnnnnnnnnnnnnnnnnnnnnnnnnnnnnnnnnnnnnnnnnnnnnnnnnnnnnnnnnnnnnnnnnnnnnnnnnnnnacctattttaataccgtaaaacagccgatattaagtagttataaaaggtaagaggaatacagtagtatataaattagtataatatcgttttccttataaatttaatcgaattgaggggttaaatggcttctatagctatcgagtactaaaagtcgatacctttctactatatataataaagttgatagtataaagagtttctaaagctagcgaagtccaatttcatctgatatctatctatttagactaactttaaagtgctagttactaggaaggccttcgaaccataatttaaggaagaccttacctttaaaaataatacacggagggaggacccatcccgccgcgtttatacattcaattgcagttacccactcgcgatttctaggttataaaagtgatctccgaccgtagtattcacttcttattataacctttaccgttacaattaatcccattgcaaatccggtcttatcgaagttataaatatcgtctgggtcaatcccaaattgaataatagttttttgaacaagattaaaccattctccaatgatttttgggtcttcacacttcgcgcgctcataattataacgtcttgagaaccgagaggaaagaagagggcgtcgttttataaaattgtaaacccatttttcgccaaccaaaatgactagggtagttccgcgcttttcaagaagaagattcgccatttcttataccatagagggccggggagctgatccacgagaatccatagagagaatccatttttgaagagattcctcttcaattgtagtcaatttagtcgagttggcgcgagaagtcgcgcggcattgtattccatcgaggcggcgccgaagggttgaacgcgggacgttaaaggtacgggcggcaatagaaatattggtaaattcttgtttcttaaaagcctggatagctagtaagatcctaccctcctgctctattgaatctttagaggattgagagcgaattggtggcatggtgggtggttgaactaagtaagtgctaattcatggacgcgtttttgggtagggtggccacccgcttaccgtggccactcgctttccgaatccatatggtggagaagaacgccgatttcacggagggtatcatagtcataagagacctggcttttcgattctagccattccaagatggagtcggccttttcttcgaacatttttctcagggcatcatggtcctgcagcataggcggattgacaggttgagaagacatgatagacggcgtggaaacgcgacgagattggttgacagtgttatgaaaatgatgaagagacgaagaaacgtggagatgtggagatagagaggtggaaagctggaaagctggagagctggaataagtctaggaactataatgcctctgggcggaaatgggttagtgtgtcaccgtgacccactctcacgtggaccacctaggcagcctgtttccagcttactcagcgtaccgtccacccgtggacccagctcaagggaccgggcttacagctgatcgaatgttagaatgggaccgctaatttagcgtgaaggaaaatatattaatccgtgttaatccgcgtttcgaccatctatctgctcagaggggtcttagcgaatgtcgagatctctctttacactaggatgtcttcatagcttataatagacgttcataaagaccccgtgatcattatttacagtattatctttaccactaaatcctatcttcttctgtactagtgtattataacccctgtcgatttttttaggcggattttcatactgtcctatcttatactctacatatatccagtataaagaaacctttctttaaccctccggcttttgcactttgcccaggacagctacctcaaccattcccagcacgttataaaggagcaccagagcggccaagaacactttcacctgaccattacactcatctttagagggagattaatcctaacactatacccccgctagggatcctcgctgatataaatataataataccacctaatatcttagcccaataggcggataatcaatcagaagattctaccgaagatctgaatctcctagtacaagatactacaaataccctcgaggctccctagacccccttggtcacagctgagccactatggttactatataggagcctcgagtgtatttgtagtatgtcgtactaggagatcaagatcttcggtagatacagaattatccggaagcggtggacagcaggcactaaggcggtgtacagaccatccattgagagaatcagtacggagtagcatgaacaaaagaaaagaaatcaacaatgtctcttctatacagtctgtgaagcgagcggagtactccctgaacaagggggctattcccactattcatggctattattgtatgcacctaaccgtgtagaggttaaacaaggctagttgtgcacacttgacaaaatgacagctgagtccgagcaccgggggaatacaacttgagtgagtgattgagctgcatcatacggagtacagaatacatacacacttgtctacggggaaagacacctgctaattggctataccctatataagatttacaggggctggggtcggtggctacctgactgcccaaggccaggcctgccccaccgttccttgctacatagatattattcaatgcctgcatgaccttcgccattcttgaagtgtttgccaatttttaggtaattacaaggcgtgaactagatctccgttaagcgattcggcaaacttggcccaaattgccatgtgatatagagagtactagatatctcgtatacgggatcttcggtcacatcatccacagctctttgctttttcctatagctggtgttgatctgtctctgaactcagctcgccactgctcatgggtatggtagtgcatagtgatcacccttcacttagttttacgttatcataatttgtgaaatctatagatggccagttttctagaagtcaatgaccaaccccagtggtagctatgcactgtgacacatggggaaccccagctgcatgatcttcttgcgcagatacacacagtgccaaaactttcgtgacctgcttagtcgataaaagtgagacacgcaagaatgaacgaagaaatagagctgacgagtatagcccgagttatggggagctgaagaaaagatgtgcagctgaatgagccaataaacatgcacagtgacaaaacgaagacatcgggattcgacctacttagagttgcacagcagaaaaggaaaggaaagtgtgcatgtattgtcgatcatattatatacggagaactccgtgtagaatacagctgcatctaatttaaaccatatgcatgatgcacgaaaaagaaatccacatgaaggcaagagaagctgaacccttgtaatactccccctatttgaactccgtatatttacttgaataggacctatttatttggccttggaacgccttctacagatatccttcttctattcatcatccttcatcatggtgccctcaatcactaggctcgaacatgtgtcttctatcatacctatcaacaccttgaagctacccaagaaagctccctctcacacacaagactccgtcgatcttcctcttactctttgcgaatcgcatatactcgaggctgccaactcccagtacttggaatacctggatccagaactagctcggggtcttgacattgagtcaattctcgttgtttgctggttacttgtggtacatggtttctctcctgtgagaaccatgtacctagagttccatcctggctcaaatctgtgctatatagatggcaaatgtcaagggactgattcgcacgctcttggattttccgtggagcgtccattgaaggacctcgttcgagacttctgtcttatcaaggcaggcatcaactcgggcgaccctgatgaagggtgggcttccgatgataagaatcaccttctcacctcggctgtccgctatggtggtgaccgtccaaatttggaaaaggcacctttgtctgccaattcaaaggtaccgtttccatatcctcactcaatccccccgtaccctagcaaagctaatctcatctcggtctagatccccaatccaaagctgatgctcaacgtgacaaatgacaatggcaagctgcacgcaagtcttgccttctcgtcgcccgagatgtcgaaagaattcgcaacaagccttcttcactccttgaacaaggtcgtcgcatccatataccattcacccgaaacttctttgggcgaccttgatctatgctccgaccttgacctcattctcctgcaaaagtttacgagggaggtttcggactctcatgagatcttgttacatgacatggcattggagcatgcgcgactgaccccggatgcgcccgcaatctgttcctgggatggaaacttcacctatagagagttggataacctcacatctcgtcttgctctttacttgaccgggcttggcgttggccctgaaattttcgtgcttagttgtttcgaaaagtcatctttggcgattatcgctcgcctggctatattgaaggccggcggggcatacatatccatcgacgccagcgaccctcccatattcctggactcggttatcagtcgcgttaatgctaaaatcatgctcacatcctcggagtatgcatcaaaatatgcctcacttgtctcaaacgtcatctcgattacagaagacatgctgaaagagcttcccacaggacctctggcttccacagtccaacctcataatgcctgtctggttttgttcacctctggaagcacaggacagcctaagggcattatccaagaacatcggtcttacgccacagcaatccgcgactacaacaaggtcctcgggctaggccaacacagccgtgtatttcagttcgatgactatgcattcgacatcagtaacaacgattacctcacagctttggctgccggtggctgttgttgtgtccccacacctgaaaaaagcatagctgctctgattgaaaatatcaatatcaccaacaccaatatgagcttcctgactccaacaattgccgtccaactcagccccaaagacgtcccgtcgctggagctgctttgtatcggcggcgagcccatgtcaaatgatctcctcatgaaatggggacctcatgtgaagctggtaaatcagtacgggatgggcgaggcggccaccttctgcgcgtacaacgacaaccccaaggcaggccatgatgccgtcgtcggaaaatccggtagcggcgctatttggattgccaatccctcctcgtctgagcggccagttcctatcggcgctgttggcgagatcttgattgaaggcccacatctcgcccgtgggtacttggatgacctctgccagaaacccgacgtgggattccttagcacagtgcctcggtggattgccgatctccacccgtcgcgagcgccgacctcgcgcatctatcggtctggtgatctgggtcgatatcgccacgatggtactgtggagcacatgggcagaaaggacacacttcttaagctcaacggtggccgtgttgagtcaaccgaagtcgaatacgtccttcggaagaccctttcgcctggcgattttaccgtcgtcgatatgctcggtgagattgacggtggcgatagccccatcctcgtcgcttttatctacttgctggataacccagcaaaccttcttccgggaatctcagatcaggaaatgtcgttccttcccattacaaatcgtgtccgagtgaacggcttggtggaggcgatgcagaatgaagtctatagcacgctgccaaaacacatgatgcccagcttgtttctccttgtcgatcgaatcccacgtacaaggtccaacaagcttgatcgcagaaagttgcatcaaatcgcccaaaagtggtatatggggaacccatgtctgtaaagtgataagcactgtttttcatccttctgatttattttctcttctttttcgatctggttcatgtgcaagctggggcagatgttgactcgcggcggtttggtgtctactcattatttaatcacatccatagcggcgggtttcctaaaataaaaccgtggtcttattgagcgtcaggtcctcagactctagatatacgtgagtttctctataagggcctgtctacaccatccaagatttgagaacgcgctctcatacaaccttggaagcggtggcagtggagatcatagtacatagagttgacacaggtacatacagtaggtaatcagtgtatgcatgcgtagtgataaactaagaactgctcctataagaaaatacagttcatgttaaggaaccacgtgtaagttaaacagggctagtggtgcacatttgacaaaatgagattagaaccgagtatgtactaaattgagaacattagatatatgagaaaaggaaaaaaagaaaaagaaaaccatgggctaagtgaacaatagagggaaacaggaaatgcctgaaatgccaatgacacaaaagcgcgcaacaccataagaggcccacgaaacgacctgatatacgagacttcgtggacgtaaaaagatcgataaaacacacatgacagaaccgaagaatgatataaacaccgatgttgtttagaatgaaattcaaatcagaatatactaggtagaggagaaactgatcttgcattaaatggatgaaaaccatatcctgaaccatttcagcactaggttggttgcggttgcatctggacctggaaggtatgctgatgttcatgctgtggtgcgggcgggggaggggcttggctccgctgtggaattggtggtctgcgtgattgtcctggtatcccgtggacaggggactcagacatcgggtgttgcatatgttgttgcatcggagattgaagatagggctgatgaggaagaggccgtggagggtggacaggagaatgatgatgcatttgcatgtgtggcatagagagcggctggccaggctgctggggcagggattggctgtgcggcaagtgagaaccgggttgtgcagacatgtgttggttctgttgctggtgcatgtgctggacttgcggctgcccaatatgctgatttgcctgcgcctgtgaaggctgattctgttggaacatatggaggttctgctgttgcggcagagactggccttgaagcatctgcgttggtgtcgggcagtgccgcttgcgcgactcttcatcgattgaagaggttgcacggttcagtatcgtcgttgtatctgcaccctcgcgcaattgagagttgacctctgcttgcgtctgatctccactagccgcggcagcggctggcgctgccggcctcnnnnnnnnnnnnnnnnnnnnnnnnnnnnnnnnnnnnnnnnnnnnnnnnnnnnnnnnnnnnnnnnnnnnnnnnnnnnnnnnnnnnnnnnnnnnnnnnnnnnnnnnnnnnnnnnnnnnnnnnnnnnnnnnnnnnnnnnnnnnnnnnnnnnnnnnnnnnnnnnnnnnnnnnnnnnnnnnnnnnnnnnnnnnnnnnnnnnnnnnnnnnnnnnnnnnnnnnnnnnnnnnnnnnnnnnnnnnnnnnnnnnnnnnnnnnnnnnnnnnnnnnnnnnnnnnnnnnnnnnnnnnnnnnnnnnnnnnnnnnnnnnnnnnnnnnnnnnnnnnnnnnnnnnnnnnnnnnnnnnnnnnnnnnnnnnnnnnnnnnnnnnnnnnnnnnnnnnnnnnnnnnnnnnnnnnnnnnnnnnnnnnnnnnnnnnnnnnnnnnnnnnnnnnnnnnnnnnnnnnnnnnnnnnnnncgctcttccgatctaggccgcccacgtggtcggcccgtgccaggtgcctttggtttggctgaagctggcttccttggtttagggggtggtaaaggttgacccgttgcagctgcccatgcaatttgatcagccttacgaggacgtccacgttttcgcttcagcggagtgccgtccggtcccagaataggcgttcccttgattgtgctattcggtgcggtggagcctggagcggtcggtgtcatattcgcagtgaatgaagcctgtcctggctgaggaactcccggcatagactcgccgttttgggcagcctgtgcggcctgcgcagcaagcctagccgcaacttcctccttcctaggccgtccccgacgacgcttcaaaggcggagtggcaatctggtcacctccaactgtggccacagcgggcatctgcccttgtccgttggcctgtgtggggacagcgctaggaacagtcatggaggcatttagctgaggttggacatgaggctgggattgggtctgaacagcttgaggttgaggcggaggagccttcttggtcttggctttcttcttcggtgcaggactcgactcgtcaggctgtatgaccggactttcagtgactgcagagataaccggtgcagctggctgcgatgaagacacggcagctgagtgtggtccctggtaatgctggaactgagcctggtgcggagatggttgaaattgggtctgctgcggctgagaaaattgcgtctggtgtggggcgtactgatgttgcgattgaacttggtggtgctgatattgagatgggtggaatggaggctgagtgtgttgggaaaacggtgattgttgttggtacgggttgtgcgcctgactttggtgctgcaatttttgcaatctctgctggtccagttgctgcttctgctggtgctcaagccgctgctgttccagccgttgctgatgctgtttctgttgctcgagcctctgttgctctaggcgttgttgctgttggtgctgctccaatatcttttgctcgtctagcttttgctgctccaattccttctgttgctcaagccgctgctgctgttccaagcgctgctgctggatttgcttttgctgctccatcctttgctgttccattctttgctgctgctctagtcgttgctgctggaactgctgctgttgaatctgctgttgcagctgttggtgtgtttgctgaggtgactgcggctgtgactgcggctgtgcctgtcgctgttgatttaaagcaaacatagacgggctagccatagacggactagcagaggtatggttatccctctgttgcatgcctgcgtgaggtagtctgttcatcgcctgctgtggcgaaggaacactcatggggtgtccatgagtgaggccggttgtccctggctgcggccgaaggtgggccattggattaaacccacgctgcaggttctgcagcgccatagggtctgggttgcgagacataagatccggggagctctgcgccgtaaattgccccgggaattggccataactgctgctagtggggtagccacccaatgaccccgatgtcggggtcatcttacgcatatctggagattgcgacgcagcgaagttctgctgaggttggccccgaaaaattggcttgttgcccgggaagggactgccatgctgtggcagcggcggccccgcacctagtaagggcgattgggcatgctggcgttgaggctgtggacctaacggatgttggggctgaacaccttgatgttgttgctgctgagactgctgcggctgttgagggtgaaattggtgaccaccgtagttcatcatcttgagtcaattttagagatgcgctggcacttggccgtaagcggcagagaatggagtgatcctttccaaccgcgaagcatgcaagggcgagaacggtcaaaataatcgcgtactagcttgaaaaggaaatgtagaatatagaaaggcagttttaaatcaagactcgtcaccgatatgcgccagcgctgctgataattctatacggggaatcaccacctgagtcgcgccgaggccgcgtgtttgtttgttccctggcggctgaggccacaaggcaacaaggcaacaaggcaataaagcgaccgcgcaccggttcccaattgggtttagcggctacggagaccgagacaagtcggtcagcgcactttgagaaaatgagtcgacggtcgctcaaagggatccagggggggagaccagctggggggatccagagagacagcgaaggtgatccaaatctatttgctagaggccttaacggatgtcagggcctagcagaagtagattggagatgaagtggatgacgctgggctggaatcctcgatggcgagggaaaaaaacattaaaaaataaaataaaaaataaaaaaaagaaattgggaaaaaacggaattttcagattctcctctccacatcacgtgaccccgaggctgccatagtgtggccgtgttcaactacactctctacccaaggtgagttggatagtctattcatcatctcgagctgtggaggtgtgaggtttgggatttcgaaacacctgaaccttcgtttgtctccttcactcctcaatcctcactcacacactcggccatctgcttatcttccgcaatccttgcaaagtatagaaccacaccactcacaagtactacacaaagtacgtgctacctgaaaagtatggagacatcatgctgtttcctaacatccttgtcctctgctacccggagatctgccaaatagggcgaaaagaaccttgaaacaaacccctttcaatgtgccaatactgacgaagatccacaatgcaaaccacaaatcaggagcagatctgcacaaaattagccgagcactataatatatgttgtatgaatatatctttgatcttgtctttctgagaatattcaagaaaccgatagacggtcttttctatctttcctattctgacgaaagtagcctctggaggtgtaaacatgtgtaaaaagaaaaaccgataaacggcgcctcttttgtaaatacacatgaaattatggaagcgacagaaaaaaaaggctctaaaatgtgcattgaaaaaaactaggacatgtatatatgatcaagtttcaaggtacagaagtaatccctggacagattacaaccctatctgctctgccgcaacatagtcttcccagaccttcttaatgtcattttgataaatgaaatccttgtctccatagagaaaattgtcgattttggctttcagaatgacatcaaaatctttctcttctgcttggagttgttctgctttgtcacgtatttcgtctagatgctgatacctgcaaatggtcggaaaagcggcgtcagacaagccattttgcgcacgctttcaagtttgaacttacatcttggcatagtatggagaccggatctgttcaaagatctctagagcgtctcgtgtagggcgagaagtagcctgcgtaaactcaagcgcccgtgcgaggatccaaccatcctccatggcaaacgtcgccccagatccgaacgcccctggaaggctgttagcacttgacattataaccttaaatgataacacatgaacttacctgaaagcgggtgactggcatctccaatcagggcgactttatcccagtcggtgatcttgtttagacgaggcccagcgaatgttgcaaactccctccattctccttcaggaaccgcgcttactgcgtctcttattctttggtcaaaagcctgtttatatgttagcagtgagtcttttttttcagcaaagtttctcgcacctcaacacgggatcccactttctcgttggttgcagggataccccagaagaccgtcttccctgagacctcaggctcacgataggatcgaacagtgatttcaaaaagcggatctttggactctgcctcatcgtccacatcagagaggtatacatggccatcttcaccccaccaccatgaggttgtagtcgtgatgtccgggatgtgggccagacgagacttcggaattagaacacggaacgcactgttacctgtaaagtgcagtcgatgatcaggcaatagggccctacggacaacctatctcatgaaggtccgtcagtcacacatgccagttttatcacaagaggctcgacgaacagagtgtattccgtccgccccaacgacaatgtccgcaatcgcttccgtttcatcctgaaataccaaccgaaccccccgacccgaaaggttctccaaagatacaacctttttgccaaattggatcaagccctcgggtactctcgataagagagctgactgaagtcgggttctgcgagcacggattgatccgcgggaatcagcagcggaattttctggatgctcagtgatgttcaaaatcttccctgtgtaggcatttcttccaagaattgaaagttaacatatgcatttgttgttactgtgtccaggaaagcatcgcttacctttggtgtgtgttggatttggagcctcccttgacgccatcactagctccaagtaaatctagaactctccatgcatttgtgctcaggctgaggcctgcaccggcttctcggggctccgtatttttctcatacagagtcacctttagaaacggcagttctgagagagcaatcgccgtacctaatccaccgggcccgccaccaatgatggcaaccgatgtcaatgcttgtccgaccatatttgcgaaataattgtatgtttagatgtggtggtttccgaatgttgggaattttgtcttgcttatatatccaaagtattgcatctcgcggtcggcgctggccggtagataactccatcgcacgccatactaagtctcgaatgtgccatacggcactagtatgatactgcccaccaatcccacgacaacggattaagaatcagaccccgcgcgtggattgtcatagaatatttcgatttggcacgtgctggcttgttggtgagtcgatcagaccatctccttagttgcaagtcaagggaatagcgttggcccgttgagagaagaggataccacctcaaagccaattgaccccttatcatggatcactgatgtctagctattagtcttagtgagaattgtcaccccggtctctagcctgctatggagagatcaaggttgaggaatacgacctcggaccttctcccatacaaggtacatgatataaccccggggataaggtcgttcgagtcttgcttatcaaccgtatatcgaaggagtctagtagtagcagtgtacctattctctataaacatcttcaagaccaatgatgatatgcatgttctactctatccctaatatagatctcagatctcaagcttgccacatagcaaatctccggttccagggaggctgccgacatccccaaagtgaaggaatgaggcgactttaactttgtatcgtttttcatggtcataaactccccgatttgggaagagacctttcacatcataccgaatgatgatctcgaatgtacaaaaagcagaaatgccaagtcgtgagatactcctcgatgggatagtacttctggatagtacccagaaaagtatcatatgtcacagatgtctagggcttgatatatcaatcggacgttctgattgttgttatgatcttttggcctggaggtactggaggtcaggtgcagcttgagtacccgcaacgcgttgtaatcacgtgaaccttggcactcgttcccgcccaaacgtaaacaaccgactcaacctaatataccccgattcacaccttatggcagctacataacaccgctagggggggggggggggggggggggnnnnnnnnnnnnnnnnnnnnnnnnnnnnnnnnnnnnnnnnnnnnnnnnnnnnnnnnnnnnnnnnnnnnnnnnnnnnnnnnnnnnnnnnnnnnnnnnnnnnnnnnnnnnnnnnnnnnnnnnnnnnnnnnnnnnnnnnnnnnnnnnncggggggggggggggggggtgggtgggagggtttatgagcccccattaactccttcgcgacatggagaaaagctttcctcaacaatcacccaggtcatcgtcgagtcctcgacatcatcgagccggccagcgatcaagcacttgaacagcggttccatcttagctattatgctagatttatgcgaatgctggatactgatgaaattcttcaatgttatgtggaagacaaggtccagtggattggctccaccagctcactcacctcatttcttgcttactcaaatcatcgaaaagatagttacgattatcatccaagcctttcccgtctatctgcccgaatgcctgccgagccctcttcataagaacttcttcgcagagttggtttgggaaatatcaagtcaattaagggtgcttcaaaggcgtgacgagctcgcagaatacgtcgaagaagcgaaagttccctctgtttcctcggcgattggtcctcccggttgaattgcatcaaatacatgccgaataatttcaactcaaagtctataagtacaccaattcggactgcgatactgttgacaatctccgcaagcgtggtatccgcattaatgctgtcggtcttaagtcccactttgttgtcggccagacgccatcgcttgccgatcagctcgctactaagaaggcttacatcaaggctgatttggatgttattatcacaggacttgatattcgcttcgcggaggagccatactatactgctaacatgcaggaacagcaggccgcggactactacctctttgttcaacgctgtcttcaggctggacatagctgcctgtcatgataccctcaaggctgaacaggcgtattgccccgttgttgaggtgtgcaaggtaataagtgcactttttgttggcctattggtactgggtcatatttgagaggagaccttgaactttgtaaagagaacctaatttgacttttacaaatacttttaaaaagttcgcgtcaccgggcggataatttggatatctcataactcttaagcaccatttatcctagtctagagttgatcttgtgcctgtgcttttgcaatcgctcctggggcagcaggcatgagtgcacctagaggtggctggttcttccctttgaactcatcgcacatttgttcgaatgtaacccactccactccctcatgactattgatatattcaatgagcctgcatatattgcattagtctcacgttggccaacggtccttgggtgtatgaatatgaacgtacctttcgtgcatgagcaaaacatgaggccgacctgagacatcgggatgaatcgtcatggggaagacaaactcgtcgtattctcgatagaaatagtcgaagtgatcctgtattaaaagaaccacgtcagaccaaattctcctggttctggatgtaggtagagactaaccttccaaatatcctcaacatcacgcggattaacccatccatggctattcgccgaattcttgataaacatcatcggcggcaaatcatcaatataccaactgccaggtatctccacaagtccagtagtattgcccctgacgagtggtttcatccacatctccgccttctgcttgtagtcaattttcgtccatgtatccccagtccgcagccagtacatctgacaatcctcatgggacatggaatgatcatattcaattccataagcgagcaagagctcaaccatctctgcactagcctcccaccacggcgcgacaattccgcgtggtggctttccgcagaactcagtcaacatcttatatgtcttgtcgaggatgtcgcgctgttgctccgtagacaagtcacaggggttttcatgcgagtagccgtgcaacccgatctcgtggcctgcgtcccggaccatagcacattcttctggaaaggtgtctagggtgtgacctgggatgaaccatgttgctttgatattgtatttttcgaaaagcttcagcacgcgcggtgtgccgatgtgtcctgcccagagacctgatttttatgagttttgtcgatgtgagagtgacgatctcaatgacacattagcttacctcgactgatatcgctcacgctatcctcgcctccgtatgagcctagccagccagctactgcgtcgatgtcaacaccgtagccgacaagaactcgctttttgcccatggtgattgggtttgatttattgctgatgacagggaggttgaggctaagattaagaaaaataatgggaaattgattggaatcaggtgtaggcgaggttttgttgatggaaatatatatggttctctacccccaaccatgcaccacgacagacaaaggtggggtgatccctaaaggcgttcaatcggattttgtcgtattgaaaatatcttcatgttatggatagctatttatcttgatcccactcatgattgactccgactaccccacttgaggtcgtctgctctagcttgtgatctatcaccaccatgacttgttctggtatagttacaataggccgacatggatccatggatatgtgcctgcaagtttttaaccagtcctcaatagggattttgctacctggcgttaactctaaattgatcgcacacctttgtcgtcatttcccccttcatttcctgtcatcttccccccatcacgctcacgatgcccgaaagagaacctcgtctagttcttcccaagatgcttggtgaaacgatcaccacatactgccctgatcctgatgaccttttattatcttctctttacaaaacacacgaatggattatcatggagaggctgagtgagggaccatgcccaattaccccagaggattttaaccaaggcatgggttctgtatctactactggaacatatctttgtcgatgtatagatgaccccggatttgatctcgccttcatctgtatctataaagaaatccctctggatggcactgagtttaataatttagagaatcggaagaagcaggctaccattgaatctttcgtggaactagatgccttgaagaagtttacagagaccgagtgtactgctatccctaaactccttggatatcaaatcaatagccaaggcgtgaacgacgttatcccccgcggatatattattcaccttatattcgaaaaggtccgaggagaacctcttgaatttgaggagttctggagctttcccttatataaacgcaaatctatccatgataaattcaaagttgcctatatatttgttatatagtctaattataatcacatctttcgagctaactagaattagggaaattctgaggtataggttcatgcttttatcaccggaatcattaaatatcatacttgataaagacacaggtgatatatatggtatcctataccctgaatactcttggatcttgaactaatattacatagcaaaatcaccggtttcgatatggctatagagatcgacccagagtacgaatggacagacatcaacttcgtgatatatgacctggtcctgctctcctcgaactatgagaagtacgttcccatggcgaatgatatcaccactgataagtacgagggctggaggtggtgagaaggagggttgatgctaaatgtcatgatctttttgacttgtttgcttgcttgcttcctgtttgctgttgcttctttccttggttcatagatgtttgctagctaagcgagatgattgatatctgccatgtttgtagcagtagtcagctatataagcaggcaatggccaaaggccacaatataaattccacgtagatgaacgactcatgactgtaactgcggtctcgcggtctcacacgaatcttcaaaataaatggttcagaattctaagctgtgtcgattgtgaggcgccagatcgacctttaagaaaaaaaagtaaattcaattaaataactaagatggagaaagaaagaagaagcaagttgtaaagtggaagcaaccagttgatatagctgaccactttgcaaacgttgcaaaccttgaaccttctcgcttagtgacctagcaaacaatctgtctaatgaagtaaacaatgcaaacatgaagcatttgatatcgatctattgtactctgtagaacgtgacatcaatccctcaaagtttcctttcctcaaatccgacccactctcatgacaccccatttagatgaggctttgataaattccaatatttcttcgattgcgagtcggtaggagcaagctatggtattaaaaaagataggcaaagatcagagctcttatcgtgcgaatgaattgggacaacccccacctttgaagcttgcgtactgcgtggatttcccgaagtggtttagtatcactctagtattctgaatacgcatcacatgacttacgaccctattcagagatcacctgatcccctaatctatctgtcaccatgaagatcgaaattaaatcgtgggttcgaatcaaatactctcagctagctagcatttaaacgccgttttcataattaatttttttttcctattggtggtagttaatttgaattaattcatggggaagatcatgtgatctctgaatagcttcatgttattgacataacaggtaatctctaaataccaggtacggtcctaagtcatgtgttggctatttagaatactactagttaggtatagcatgtcgaataccctaattaattggttatgaactttgggagggaaagcatagaatgtttgatattgacagtaaagaaggtatgactccagacatgatggagtaactaatgtattaatgtatttatttgagcccaagtgattgaataatatcttaatataaccatccatccaatttccaatctatgatggtatacgaaaaaatcccaaagcatcttctcggcctatccatcatagcgcatcgtgtccatgtgtctcaaacggcaatcccagacacaaaactccgacaacaatccacaatgccgcgctcgcatagattggtgcagtggtaaaaccggtctgcgacgagataatactggcgacgagtcctccaaatcgaaggagcgcagccgctgttccgcaagccgtgccacgatgaggagctgggaatgattctggagtgaacgcgtacataatagcgtattctgtgacactgattagctatgaaattagacatcggccatgatagcagtctcaccgaaattgcctagaaggctggtaacacaagaaaatgccaagtcggctgatggagtgttgactccgacatatgcgaagaggaacacgcctgtgacagcggctgaaattgacatcatccatcttcttcccatgcgggtattaaccgatactgcggcagataatggtccgactattccgacagctgatgtgatgcagtagttgcgatatgttagggagagagacgatttttctgtgaatttggtcgcaaggtaggaaggtaagaaggcgaagaacagcgggtatgcgattcctgaatagtgtgagtagagatataataaggaattgcgtctcacttaccgactgtcaaccagatggcccaaatgatcaatgtctgtctaccgagctttggagttgcgaacagtgcacggtagtgctcccctcggaacgcttgcatgttctccttcacaatttcttttgttgacattcgcttagactctccttcgctgggagtatttccaaacctggcatcgatttcttgaagcatctcaagcgtcaggggctctggctttccattttgtttcgcaacataattaatggcgttgaccgcatcctgatctcttccctgggagagcagatatctgggggtttcagggagtttgaaaacaaaaatgcgtatgatggtaaatgcgagggctagacctcctagagtgatgagtgtgtatctcctaatgattcgaaattagcgtggaaatgcactgtgtatcatggggctcttaccatcccatgttctggcttcgagaacatgtttctggggtggcatcagttggacaactaaagtgggctaggaatacccaagaaatcaaggagacaataagttgactcagattccaccaagccgaaagagctgtgagaagatactgatgactggaggtctttgagttagcagcggctcacagtaatatcgtcaaattgaaaactctcaccttcctgggacgaattctagaaatatcatcgaatcaacaggcacatttccaccggctgcagttccaatgactgcccaaagtgcactgaatgcaatgaagttcattgaaccagcagcggcacacagaaatatgccagcaatgagtagcgtacaattgaaggctggcttgcgtccaatgagatcgctcgatagaccccaaaacgaagcacccaaaatgaggccaacataatacgcaacggaactgtagctgacttggacgataccagtgaactcttgcttgataggtggctggacacttccaatgccctgtgatgcaaactattcgaagtatatgttagcaagagtgatttcaggaggaaagcagtgatcttgcatacattatcgactatccatccgaaaccggtgaccacgaagagtttccattggaacctagtagtgccaggatatcagtaccgcaatcaactgctcaagattgagaggagtgaataccagcccattccaatttcctccaggcattttcctactaactcagacttcaagcggtatgccttagtggtagaggatccgtagaaatcctcaacctcataatcatcaatagtcgttagcttagaaacctcatagtccggagtgctgctctctgttggccggatctgcttcttgtcgacttggatttcgtccatcttgcaattggaaattgagtgaggaatttcttgctctcaatgtagacatattcgggtcaaatgtcgttctcttttagggctacgatgttgctgccaatcgatcatcttgtctgatagtccatacacttcaggttgatacggatggatccggctaccaagagtggagagaaaataaggtgccatcccactcttgggcccgggacgcgttggatctacgatatcacaacagcttagaccaggccgacaattacttggcggcttcactgcacttcactctattaggtttatcgatcaattgagccaagcaatacatggttattcagtgctttttcgtgttgtgtgctgtagaatgtgctaatattgcaatttcttacttctattttggggttttggggttttcttcggtacgagagcatcaaatatgtagaaatatttataattgcaatatggataacactaggcaccgaccgcagcaacaaccggaataacatctgccttctgtaaatccaaatccttcttgaattcctcagcgcggccatagctctccttgtaagacgctgtaaccatatcctgcacagtaattggaccgtacttggcaggttccccctcttcgcgacagttaggcaaacactcgcagatatagtccgggtttccactgaaaaagaacggaatcgagtatctctctcgaccggatttgttgatcacacgatgggtgttggatttatatttgtcattcgccatgcgcatgaagaggttacccaaattcacgacatacgctccaggaacgggtttgacctatcaataaatctccgtcagagccaaggtcaagacactacgtcagtcataactcacatccagccattgacctgatggcgcatctagcacctgcaacccatcgacctcatcctgtagaaggagagtgatacatccaaagtcggtatgcgctccgatgccgcgattcaatttctcgtcggtgtcctccggctgcgcgggatagtgcaggtatcgcattgttgcaacggctccgtctgtgagagggtcgaagaatgttgattcaactcccagcgtttgagccaggacccccaaaacatcctttgccagatcgaacaccgcgtggtagtattccatggttgtttcttggaactcctccttattgggaacagtagggggccactggttggggccactgttcagtttcttctccagatagtaggggtggtcttcggggatttcctcgccgatgtacaggccttctttcagctctggcccggtgcctacttctagcatttgcgaccggaggagttcatagcctctgttgaaagtggtgagatctacttggttagcagaattcgcgatgagcgggtaaggatcttactcttgtcaattttcaatttctcctccaggggaagatcaaagaagcgcctggagcaattcatgacacggttctgcaagtccagtgggatgcggtggccagtgatctgaaagaagccattgtaatggcaacatttgcgcacttctgcgatcaactttgattttgcgtcgctatcctctccatagaatggagagaaatccaagatgggtggagctgcaggtagagacatagtagtggtgagttaaccgatgaggtgtgcttatgtttgcttttttagatcgcgctgctttcaatatatttctgtggaattgaataatagctacttcaagaccgttcaacctcgcacagaagtccgacatctcgactcgagctactccagctgtagctggagctctgggatgagccatgaaagatgggggtggtgacaagaatgtccaagaatgggggtcaacggttttagctcgcagcgataagggcgtgcggggaagacatgggaagaacaaaagtcaaaagtccaaaccatatcctatctggagaatctggagatatggctattggtcacgtctggttggatatggctttttgtactagtagtacatatgtgaacgtgaaagttaggaggttagaagagaggaaatattgcttagtataagaaccctgtccactaacccgtgggctagatatttgagaattagcccttttgaaaatatagttactatgatgtctgagttaaaatcaaccgcaacagccaaggtggctgaccccgaagtcaacgtaggggaaaccaccacttatacagatcgcgatgccgaaaggtcctatgtcaggaaaattgatttcattgtgctcccaacgctgtgcttggtaggttatctagcatgagaaacatacctagtagaattatcgctaacttcgaggcttttgtcatcgcacagatgtacttttttgactgcatggatcgggtaagtgccgagaagacggcatatgcgttcccgaaacatgctaaccatcattggcagagcaatttggcaaatgccaagacagatggtcttgagaaagacttgcacctgaagggaaatgactactctctattgattcttctcttctatatcccattcgggttgttcgatctgccgtggaaccttttgatcaaaaggttttctggaagaatcatgctgtctattagtgagactctccaaccctttgagatttgcttggacttgctgacatataaatgaaagtgtctattgtgtggggagttctagcactatgtcaatgcgccgctaaggactttggctcgctacttgcgattcgcataatcttaggtgtttttgaagccggtttcttcgccggagctaccttttacctcaccttgttctacaagcgtggggaaatgggattccgcctggctatcatgcagtcatttgcagttctagcgtccgctttcagtggattaatctcctttggggtattccaaataaaccacccggcagtcaaagggtggcagtggttgtttattatcgaaggatcgatgacattaattaccggagctgtggcgttttttgtgctcccagatggggcacagaaagcatggtttttgactgatagagagagggcggcagcgacagcacgtctgcttcgtgatacctcgtctgaggtgaatactccattcaatctcaaggcttgctttgagtcatggaacgactggaaattcccagtgtggtgtttgattacgttcacataccctgttgcgtatgccactgcaatgaatttcttccctttagtgagtatcaaggagcgtattgtcgaacgttggctaacgatagcagatcgttcaacgattgggatattccgtcgtcaagactaatttatggacggtggcgccaaatcttgtcggagcagtattcctgctatgtgtggccaagtcctccgactatttccgcgaaagaacgctccatattgtcttttctttgacaatttcattcgtcggaatgattatattaatcgcgattgacgttcagaacaacaagggagtagcatactttgcctgtttcctaatggcagcaggatcatatattccgtcctgtctcgttcatgcctggcacaacaataacaacgtccatgaaaactcacgagctgccaatacgggcttttttgtaggactggggaatttcgccggagtactgagcgcgggcacattccgaactcaatacgcaccaaagtgagatactctgctattatataaaggggcatcgctaactgactaggtatctgccaactctcatcgcaacttgttgttgcaacgcagtctgcatagtcctagttcttggattaggaggctggatgcgcatggagaatcatcgccgagatagcaaacagggactaagactgagagaggaccagactgatactagtcagtttaaggagggcgaaaagagtcctgagtggagatacttcccttgatatcttcgggttgtccatgatatcgccaagtagccctagctgagaaatccaaattttaccgtcatcttttagttggtgtagttcacttccctggctatgcatagaaagtacccctatatggtttattcttttgactcttaagcttttacaaatatattgctttctactactgcgtgtcatttttaatccccttttagttataacgtctttaacgacatcatagtgtcattatataactataacctctattgtatcatttcaagcaagataaatcgaggccgataggcggttgactactattatctgatcgaaatcaagtattcaaatcttacgatgcccctggggtatttggagaacttccccaacatccgcaatcccccggccctagtgggaaattgaagagcgctaagtggccaaaacctcaattggaaagaaatcgtctcgataagagctttgcatatctttttcaaattataccaatcgggaattagcgtcattttgtccccgcatgcttatcagtagacatcggcgtttaccccgagtaaattattgtcaaagacattgaagtgcacaaccagatctcgtttcgcacatgggcaactcaggcatgaaaaaccaggaaaagcatccgtgccaacacccaggctgtagcaaaagcttcacgcgcgcagagcacctgcgtcgccatgcgctcaaccacgagcaggcgcgcaatgggtatacctgcgagcgttgctctgttcactttcaacgctcagatttgctaggtaagagaataaactaggttcggtggctaggcaggtgctgatatgggtccagcgcgccatgtggaacgacaccagaaacgggatctcgaagctggagggcctgggcaggggacactcaagactcgaaagagaacccgcagagccgaggacggttcgattgttgttcgtccttcgcagcgacaactgaggactgcggctgcagctcgatccccgatctcggcaaatagtactagtcaggagccagaactgcgagatgaggtagagtattttaatgataatgttcccttgtcaccacctggctcgggcactgatccaacgtcgatctctatggatgacacagacccgtttctggcttcgttggtgccagctgggccttttgagcagtatgttgagccagtgcctggacagttcgatgcagcagatggttcttttggtgttgagttggatgggattggggattattttggaatggacaccggtatgggtgactccagctcgttggtcatgtttcgtgcgctaatctcagcagcaaccgacttcaacctcccatttgccgcgacgtctaattataattggctgttcgatgtttcctctctcgacgacgctttccatcaattcaacctccccctcggtttcgacacggcgcccattttggaacaattcgactcgaattccgccgaaggaccggagaaatacgatggccaatcggccttactcatggcgtcaatcatggacagaggcgaaacattcggagagaccgcctcacctgcagtacccagtctcccagacctggactggatgtctggtgcggcgacgctggaccctaaccctccaatgaatctaccgacaatatctgaagaagaccgaaaggggattctagcactcgttgcacaggcacatccaacaagcatggatggaaatcccatggtactcgactcgccactcctgacactccccgcgctccaggcatattgtgacatgttcttcgatcggttcaacacgacataccctctgattcaccagcatacgtttgacccaagcaccgcgccaccagtattcctcgcttcgattatcttcatgggcgcgacatatggtacgcgtgaggctcatcaattagcagtggaggtccacgatgttctacgaagccagctactctgtcatccagatttctcacctcaggctgacctgtgggtcctacaaaccatgcttctgatagactgtttcgggaagatgcgagctggtcccaaacagcgcgagcgggcacagttgttccactgtgtgctgatcaaaatgatcaggcgcagcaactgctgtgggatacgcgacctgtccaacgtcaatcagtcaggggatttggatcaaatgtggcgacaggctatggaagaagaacagcgtaagagagtggctatacactgcttcatgtgggatacacagcacgcagtgttattctcgcagtcgctctgtatgtctgcgttcgagatcagatcttcattaccgtgtggtcctgcagtctgggacgcctcctctgctcgggagtggtcgcagcacgcctttcgtgaagagaacaggcaattcctgactgttttgaaaggatatatcacaccggcggctgtcgcccgacctcgagatctgaatgttttcgctcgaattgtcgttctacatgggttgatgtctgtatctgcggacctgaaacgtcgcgatcagacaaccctacggtcggagacacccgagcgtgtcggggcttggacgccgcgcatgggtcggtcctatgacctgtggaaagtcgacttcgatgccgattgcctggcgattaaacttgctcagactgccagtcctcggcagttcacggggctcaagatctccgggtatgccctttaccatgcagcgtatctcgcgttgaatgtcgaggtcctcgatttgcaaattgtcgctggcgcgtgtcagatcctgggtcggacagttaccgaggccgatcaggcacggtcgctgcggaatattacaagatggctacaggaggaatccggaccatcctgcagtactgcacgccaagcggcatcattacttcaggatgcggtgttgagtcttcatgactgggaccaggctgattccttccacttcccctggtgtttatatctatgcacgttggcctgctgggtttttcatcgtggacctaatctcacatccgacgacaaccgaaccaatactgatctgtcttcgttgatcgtgatgctaactaattgtcctagcttaccggagctagcggttttatctggcaaatattgtcctcgccctctagcaggagctatggctaaacaactagcgactgtccggtgggctgttgttcacgatgctatgaaagttttgatgagattgtcatgatagtctttgtattctttgtatttgatagtcaatatgtagtttcccaatccgacatgttgatctgaacaagtgcggtttatctttatctatttactatagaaaggataatcggtataacccttctgagcaggatcagcaccatagaatgtcgtgcgatcataaggagtcaaaggcaaaccctccttcaaccgacgcggcagatcagggttggagatgaaataacgaccgaacacaatagcatccgctccacccgtggcaagcttgacacccgcattctcggcgttgaagtttccggccgcgaggagagagacccctgccttctttagtgtcggccggaacacatcaagtgacggcttgtccgaagccagggagtcgatcttagacgcttcatccatcacctcatcgaatcggggctcgaccatgtgcacgtatgcgggccgcgattcctcgggcagtccagcaatctgcgaacagagcgcgagccagtggacgttggggtttgagtcccgtgtatcttggaaataattgtagggcgacagacggatgccaacacggtcagctccgatctcggcggtgacggcctcgaggacttcgattatgatgcgagatcgcttttcgatgctgccaccgtattcgtcggtgcgagtgttgacgttgtcgtggagaaattggtcaaggagatatccattggcacctgattcgttagtcacagcacatcatcaaggctggagttattcttaccgtgaacctccactccatcgaaaccagcctcgcgggctcgctttgctgcagcagcatactccttcactgtatcttggatttcctccaccgtcatagcccggggtggtgaagctgcgtactcagatccatcgagtgcgtttccgctgattgggatctcactggctccaagaacttcccttccttcaatcaaggaggaaacagttgcgcggccaacatgccacagttgacagtatatatagccacccttagcatgcacagcatcggtaaccttcttccagccagcgatttgcgaggaagtaaagatgccagggactcctgggtatccggcggcctgaaaatgttagtttctcgaactagtcaaaccggtcaaactggccaaacagcccaaacagaagaaaattcacatacatatctgctaatcggagtcgcctcggtcaacataaatcctccatccgaagctcgctgcgaatagtactcgacattaagctcattcgggacataaacaccctcggactccttgctcgctctcatccgcgtcaacggtgccaaaactacacggtgcttgagagtcagagcacccaagcggacggactcgaacaaaggatcggtgactgcgattgaacccatttcgtaaggatatatttactttgcgattggcacattttggctttggctaaggtaatatttatagcttggaggggccatggtatgccatttttggcggttccattcttgacttttccattgaaggtgggatcattgatctgcttgaatagtgggatgatggtgaggcttgagggttcggctatcaaggaaaacaacccccactgtaaaacgagctcccccaccctcgaatgtgtctccactacccctttgggatggatatggtggtgatctgactgccaatgtatgctttaggtaccaacccctgaatactaactctcgtactccgtcgtctcaacaaatatcttgttgatctcactaatagtgactacgctcggttctatccgatcgaattgctaatttcttctcgtcaacttcatcccactatctagttagagcataatacctcggttgactgtgtggtgtacaaaaaagcgatgataatgtagaccacattatacgcaatttatatgtccacattggagagcatattaatcgaatagaagtgtacaaatagaaacactacgactaacctcgttataaccatactagaacaaagaaattcccaaaatagaggaaaagtcaggtcgaaaagacggcgtgaacgtgtcaataaccacaatttgtatattcatttctaaaacgcaagcccaaagagttactcctaccaaatattataccaagaaagagaaataatcctgcaaccactgccctatgacacccacttgttcggtgtcccaagtatcaatagccccaacatatccgtcaggcctcacaacagcgatcccaattttctcctggttcaaatccccaaaccacttctcagtacaactcggccctccaatattgtcgacatataatgtccaccgactagcctgcagtatttctggcagatcagcgatctcaaactcagactgggaagattgcgtgaccattgcgaaagtaaaagcattggagacagaagtgtagcgctgagcctgaacaaattcatctgacggggaatgccccctcggatgtttctcatacgactgatttgctcgcacgctgacaccagcaagaatatattgcaactgttcacatatattctccagcgattcccgggagcggtaaacattcggcacaaagatgtagatcttgaattgacccaagagtggaacatccaactcgatatcgactgggttagcatcaatatagcgagtgaccttagctggcagctgaagcattccaggctggaggcgaaatgtggtggttggcgcttgtgtcaacattcccggagcatattcggctccaatgccggatatgaaccgaatattgctgtcgaagttcttggccaattcttcatcgcctgctgcgaacgctttgcagtgttcaacatcgaagttgatgaggtcgtatgctatcttttgtctttcttcttcgtaggtgtggagtaaggaaggcttggccagtcctcggactaggaggttgagcttccatgcgaggttgaagctgtcgtgcatactcgtgttggcaccttgggctgcaagagcagagtgacagtggccggcctgtatattgattagactatgggtgatgtgaggtcaatccggtgcaacatacgtctcctgcaatgaatatatttgcctctgaatccatgaagcgttttgcaacccgctggcccacaacatatgttccaaaccactccactgtcttccactctaggctgaacggatgcattgcctccctcgcgcgactcatgacatattcagtcgttgcctttgatttttccactcgctccccgtcggtggaactcaactccacatataatcgagtcatacccttctcgcgcggaatccataagatcgacccagcggaatgagaccgcaaggccactttactccatagatcagggaagtccgtatcgatcacacctatttggtgagccaaaaatcgtgccaagagattgaaaagacataccatccagcactccccacgccgcgtttgttaattcgccctcgagctcagcatccgggatgaatgatcgaaccttcgatcgagctccatcgcaaccaaccagataattcgctctgatcttgtgagccgtatttgtggtgacatcctcatagataatatccaattgtgtcgttccattcacaggcgaacaagacacgaatttgctattccgcgtaatagacacaccccgtgcctccatatcgtcaatcatgacctcctcaaccatcccctgatgggctagcaagatataagggtcggaggcaccaacgtgctcggggtagtggactttgcgacctgtgcgtcgaagtgagtcgttggcagttgactcctgccaatttgttagccaaatccaggagcagaattgacctaagtcctacccagaaggatatgtcgtaaacccgagctccatttctcagcaatgggtctgccaaacgaagctgtctgaatgtttcgatggtcttaggttgcattccgtcggcctttcctgtggatgtcttgtcgggacgatcgtccagaatcaccacggcgattccaaagcgaacaagattacatcttcaaatgtgttagtataccgtccgtcgaagaaggaatttacatacgcaagcatcagccccgacggtcccgcgcccaccaccacaacggtagtagaagcatcgacagagccgattctgtagccttcgtggtctgcactaggtgacattatagaattcaattgttggttgacaatcacttaattcatttctatcttctctatttattgaaatcgatgctgcggggaaaacccccactcttcactgcagatgtttatcaccatcgtgtcaccccaccgtccacaacaatgtccgacccggtcatgtacgaactcgcgtcgcttgcgaggaatacacacgcccccatgatatcttctggttcggcaatccgaccgttcatgacttcggacttccagccctcgagcaaatgggggaactggccattagcggataacctggtgcactgccttggtgggaacttactgaagcggtcatttctgttttcacgaatcctggagagatggaattgactcggataccctgttatactaaattaatcaccgtccgtacaatagtttgcgcccaactcacatattcagccagctctttggcgatcgcgggacacatcgatctgactgcgccctttgtgccacaataagccgaacatagctggctgcggacagcgatatggctcgccatactggcgactaacacgatgctgccgtgctttgttttgttcgcgatcatttgcttggctgcgagctgggcagtgaagtaaagcccgaggacattgatagatagtagatcctgatgatccttgtaggtaaactcgaggaatggaagatgtcgattaataccagcacaaggaacgcaaatatcgagagcgttttcaaaatccttctggaagctagcgaacccttcttgcaaagactcctgggatgagacatcgactctgttgttgttagcgatgaaacctgaaatgaacagtcaacccacttgtaatacgcagttcggacaccgcaatccttttcgattgcatggaatccttcctctggcgaaataacatcaaacacagctacatcagcgccggcctcggcgagcccccgcgcaaatgctagcccgcaaccccgagcacctcctgtaaccagtgctgtgcgccctttcaaagaaaactggctcggttagctcgggccaagaaaaagttggaaacactcactctcgacatatcgcagtgtagctgaatattgtcttgctgtgtagtgaagcctttcccctcagacatgcctcccttttaagctatcggatagcggcatacccacgctaagctaacccccatctttgtacatggttggagtagagtgaaataaagatggagtaaccatatcccatgtgcctatctatcataagtagtcctgtctgacagacgaccggtattcaacaattcaaacatctttcatccgggttctgttacacaccaatcacaatggcccctcaaatccccatcaaagaacaagccacccgctgcgtgtcatgtcgactcaaggttgtcattgtcggcgcaggtctcgcaggcctcgggtctgcgattagttgcgcccttgctgggcatgaggtccaggtcctagaagcaacacgggaaatcaaggaggtcggcgcaggtatccagatcctacccaatagctcgcgtgtactgcaacattggggtcttgaagaggcacttacgccacacatgacctttccccgggtctgtaatttccttggatggaagggcaatccaatttcgtccatggattttcacacatcggagagtaattatcccggcacctggtatcgtgactttcatcgtgcggacctgcaaaaatgtctggttgagagagcgctcgaactgggggctaggatcacctgcaatgctcgtgtggtggatgtcactgtgagcgaggatggggccatcgctactgcttctgcgtcggatggaagacactggactggagatctcgtcattggggcagatggagtgtttggaaaattgacggaaggtttgctcggcagagtcgatccgccggtcaaaactggtgatcttgcataccgtttgctgttgtctacgaaggagatgcttaaggatcctgatctggcggaattggtaacagatccccaagtcaactattggttaggtccggatgctcatgcaggtatgtgtttctcttcctggtctgggttttgtcgttaattgtgtagtgaactatgttcttcgtagtggagaattgttcaatatggtcctacttgtccccgacgatattccagaagaatctctggcatcgacgattgaagggaatgtggaagagatgtgtgctttgttcaaagactgggatcctcggtacattctacgatgaccttcacttatggacacatggctgactataccagtatccccaaactactaaagctctgcgattccgtccagaaatggcgtctttgcatccgatttggagactttgactggactcatccctccggggcgtttgttatattaggcgacgcagttcacgctacattgccatacctggcatctgggtatgatagccttatatttacttaattccacattcactaactaccacagtgccggaatgtcattcgaggatggagcagttctaggtgaatgcctctctcgactcccgaatagccccggaatctccaaaacctcggccgagttcctgacggccaaacaacacgccctttccatcttccaggagtgtcgcaagcaacgaacgaaaatgattgtggaacggggaaatattcaacaatatctctatcacctacatgacggcgctgaacaggaagaaagagatcgcaagatgaggatggtcccaactcccgagggagaagcattggcttggcgagaccccggtttagcacccaaattgttgggatacgaccacattgcagacgtaagtaatcgtttcaccgtttcggcggctctgaagttcactgaccgtgcttaggttgatcgtcgatggggtaaatcactaggaactagtgttattgactcgagactatagtttgatatcaccattcctgtcttggtctttcttgtcattctctgctataatctgctatatttgacctacaatcatattattttagacacatatgtctttagaagtttcctcctaggttgctcgctccaattacttgacctatcttggcctatggcttgttggaagctgcctttgatccccaacacttaggaatcaagctcccaccatagtaagggagctttttgacaggggccggcgtgttcttgagactcagatgatgaaagcagcaatataaagtatgctagttactcgcagcagatattccaagttcttttgggttgtcttttcgcgtgaggtttgagtgagatctttctagatatgtgccttcttccatatcctttgttataccgtttgtcatactgtttgtcatgtcctttttcctggtcaccatttgcagctgtgtcaaactcattctgctatcctactcccctttacacccttccaaagtcggtcaccttccttcttgtcttcttcttatcttcttagcgcaacaagtaggatctattcatatctggatatctcactttgatttggacggagattttccaagcaccagggcaatattcttaaaaggtatatatcttttagcatcgggtctcagctatccattcccaatacctctttcgtgtgccttactgaccgtacttgtgcaaggacttagaacgatgtcctccgatgaagcccagaaacgggcaaaggctaccaagccgcaaaaatcaaagatttctgtatcccagcagatgataatgataggaatgagcttgtttcgcgtaagcctggattgaggaacatgaccatacacaccatcccaaaagactggtgtttatccgcctcggaagcaacagactcgcaatatgccatgcttcggtcatattctcccagagcatcctctatcaacacttttctggacgaatgtgatagccttggacttacgaatgatctcctgaacgaagctgataggatccttgatgcctctaccgaatggtcccggtttctacaactcctcggaccgaggattctgtcgatgatatggaagccacagatgacggatggccagggtcctttgcaactgccaggcgtctgcaacagcagacaatgactgttggcggggtgcgagacagagacataattcagaacacagcggtaagacctcgcagtgccatgccccattcaactcacaatcttccagaggttgaggatgaggcaatctcaaacgcggccgccataatccttctgcagacattgtcacacctcgtcaaaaccaacctagaatggattttcaatcgagttcacttttcatgcaagtttacaagcatgacgtacaatgtttacaccgacggagctttgcggtcaaagaccacgtcgaaaatatttggaatcttggaggtaaaaaaaagaatgcgcacggtgaatccagccgccatcttcgcccaagaggcctgccaggtcgcggggtggttaatggaatcatccgcagagatggctgttttcaacaaccagtaagtttgatcgcggcttaatgcttaaaccgctatgaatggctctataggattcgactaactgatcacaccccctttctagttacatgctggtttcgcaagacagacatcaattttttttgacctttgcacccttcaacgaaaactacgaaagttacttgcacaacggaactgacaccgacgtgtttctcgtcatgcacacggttggtcccttttcgacatccgacgctcgacaaatggcacaattcgggcgcatttttgtcgccgctacactggttgccaagtcggctgctgccaacattcattgaaccgttctccacgtccactgctttctcctggttgatgtaatagaccttgttcgctacctttaccaaataaaattgttctttgtgtctactgaatgaaacccaataattatatatgtcctctattgtagatagcgccgagaatatgaagcaaatgaaatcagctcctaggaaagattcattgataagttaactagaatactgagtccataagaaaggcgtctttggttcaaggtagacagttaatccttgtccgttggaagagaaaagactgaacattagaacttgattatttgcccactccctctgaatcatgtggctctgcatctagcctgggccttctgaacttccttgcccggacggatccaaacatcctcgcaagcgtatgctctttttgtgagctctgattcatgttcagcatcttttgccccatctagtacatcaagagtgcaaaccttagggatgtcgatgacaactgtgggtttgggaactgtgggcattctgggatttccgactaggtcggcggacatgaatccgagcagaatgttcatactctcgtttgcgacttcgttagtcgagaaatcaaaaagctgagtcttcttgatgactagaccatcttggctggattgggcttcgattacacgagctttcattccgccaaagactgtgatagccataatctatattaaaatcgatatatgttagtcctcaagacatataagtacttcttgagcctatacttaccggaattgtattgtactgcaagaagtcctcgttttgaagtcgtgtgatcatagcagtggtaatagtcattacctctgcccgaaacagcccttcgctaggctgctctccaatcacaatcgtgatcatgacatatgggggacgtggctgaccaccactcggtgtcttcgccacaaacatggtgttcggcgaccatcggaccgatgtccaaatagctgggtagaactcgtcggcgatgattgacgggacattattgccactatcaagcgtacgttggtctacctattgcatcgtaatggaaccatatcacttacctctccagccatctagactcttgcctaaggttaggtggaactctgtcatctcctggggggtagaactgtcggcgaaactgaaagaacatccattctagagccgaatggatatacgatgcctgggaattagcaccttcttttgagaggcgatctgtgaattcctcccatcgctcagtaagtgaggtcagtcgtctctggcagtcggggttagtaagaacaatggggggaacccatgcagcacctttgggttcaaagaaaaccggcccgtggggatcagaatatggagcataggtgtgtcttccattctcgtctatctcaagagatcgaacatcgatgtgaagagactggtaggattcggggtcgatctcgatagaggtgagactttcggccccattgtagacatcgttgatagcgttcagaacttcgctgtgagcttccaaggagtctttgatctgttggcccgcatgacgatgtaacgtgggaatctttttgggcatgctgactaggctgaagagctagaaggaaagcagaagttggaagttggagaatccaggaatggtgggtcaacaatgaccaggtgaggtgtaatggggaatgatatatgtccccgtttggcttgttccgctgatggctgaggcccccgtttccccaccacaaaggagcctcacacctcctttctgtttattagtgtctgtctctttattggagagatatctttcttctatggtcatttcaattctcctgtatcctttgccaatagcgcccggccattcttcaacctgccgaaaaggagtatggcgtgaagatctacgtcatttccaagtgcatgattcaaatccccctgatttaagctgttagctgagtatccaagacactttccaagaattaatatttgattcctgttagaatcaagacgtgagacccaacattcttaaggtgagatgtagcatagacctacgtgtaagggatattattttccccctcggtcgatcgtggggtaagccgttaggactagcgttatcgtcagggctgtagacccccatctttgatattttggagtcactaagctccacgtacctctatctagggcaaaaggtccaatttattgaaaataaaataaaataatcttatcgttcatgtttccccccattttaaatcccctcacgatacatcgatacatgtccaagagcacctatatagactttatgctcgtaatcccaatttgattcaaacgtatcatccattcaaaatgtggcggattttcagcgcaggaaccacggcaaaagaagaccctccacatggtctaccagcgtcatggtatcgctcagaagcaatgtaccaattggaaagacgggcaatcttctcgaagcgatggatgctgctcacccactccagccgtttcaagaaaccgggcgattatctctctttcacaatcgccaacttctccttcttccttatccaggaccgcgacggcacaatcaacagcttccacaacgtctgccgtcaccgcgcattccccgttgtacagtcttcctccggcactacatccatcctcagctgcaagtaccacggatggtcatacggcctgaagggcaatctcgccaaggctccgcggttcgagacagtacccgatttcgacaaaacccagcactcgctattcccaatccatgtgcacgtcgacaaagctggctttgtgtgggtcaatctgcaggccggtgagacggatgtgaaatgggaagacgattatgagaaagttgacgaggagccccggatgcaggactttgactttgccgcagaattcaagttcgaccattactgggagatggaattggacgcgaactggaagggtgtgattgagaattataatgagtgctaccattgcgctacttcgcatccgcttatcaacggcgtgtcggatctaccaaaatatcgggttgagcccaaggcccggtatatggaacatcatatcttcaataaggagggttcggatagccagtttcgacgggcgatcacgtatttctatccgacgacttctgttacggtgacgtgagtataggaaatccaaatgtgaaagtcaacaccagggctaactaagaacgaactagtgataaattcttctatatccagcgtatgatccctgtttctgctacctcgagcaagatcgaaaatgaggtttaccgtcaccgggatgccacagatgaagaatttgagaatatcaacgcgttttacaggcaggttctcgacgaggacaaggagctttgtgttggaacgcaggagaacctcaatgcaggggtctttaccaatggcgaactacaccctagcaaagagaaggtaaatcgaactgtgacagtgctaatacagcggctaaccgcgacattagggccccatacactttcaaagcagcgtcagacaaatggtcatagaacaccggaaaaatgaggaaaagcaaggaggatccgagatttggccggccaccccgaaccctcagttctcgaagggttcagcagaagatgagagcttttgttcgcagttggatgcttctagttgtatggccaaaccagaactggcctggtagccagatacacatgtacctgggcgaaatgcaaggctgaacgtggaactgcttacagtcaattaccaattaggaactatttcatacttcgcactttagactagtcggggagatccccagataccgaatcaaagaaaaaatacaagcaggactgtatcatgaattcgctaaataatacccacaggcgaagataacttagttattcaatccaagagggttatcccctgtctgcttctggcccccaacactagaaacaccgttctgtacgccctgtccagcgcccttcgccgtattgccgacaccctctgttgcgcctgacacggtctgtccaaggcctgatgttgcgttgcccacggttgagccgagaccgccgactgtgccgcctactgtatttgtcacgccgccgactgtcttgcccaaggtatcgcctaggccgccgaggagtccagctatggatatttgtcagttggggtgggattttgatggttggttattgggaacgtacggttctgttcgttggacatggtgattatgtggaagaggctgtgtggtttgagtgacttgtgtggtatggagtgtgtaactgaaatagttgaatgtgtgtcaagtgttttgatcttgatgtagtgagatggtaggcatcgctgtctttatttatatcaccgccctgaaactggttacatagccatgacagccatcttgaggctaatatcttgaatgtatccatctgacgtactgacgtaccccatatcccccgcagtgtagataataggatgttattattggttgatattcgccgatcacatgggtacttattgtccgattaattgtttcaagaaagtctgttatattaaaagaatgtggcgaatggtggatgactggttggttattgttggtcttgtttgcaagggtatgatgtcatttttcgttcggacctggccaggagattttatattaactgtagctggatgatctcattcccgacggaattcttgtctgcagaggtaaattggtgcgtatcatgaaggctattacgacgtacatagaaggacaagattgtaaataacccatcgtgtccaacaaaggaatacatcgtcatacctatttacagactcgcctttccgcgagactcatatggcatgaacaacacaagaattcccgctgcgaggaacagcgccccgctaacataaacaggagcagcggttgtgagatcagcaaacattgcaataataggagccatgatgccaaagatccggttcgcagacgcggtcaatgcgttgcccgtaccacggtccttggtgagaaagatctcgggggtatatgcatataaaacggcatacatgagactactcatgaaattaaaggcgcagttccagcctagcagagcatttgatgtggtagctgttgttgacgcaagaagaaaggctccagttatagccgttgaactagagagagcacccttgcggccaaagcgtggcagttcaaccagcactccaccgagcagacagcctgggatgcccataacggcaataatcaatgaattccgatacgtgatatatgtcgatccgtcaccaaattcagcgcctctggactgctggatgtatggaaggaatgcattgtatagtggaaagccgagaccgatgaatgcccaaacgaggatgatcgaggttgtagcccatgctcgttttggggtatcgaaaagagcgcggagatgatcaaaccgcacggtttctaggcgttggcggacgatgtttgccgcgctgaaattctgtatctcgccctggtcccaggcgtccagatcggttctcgatagatcagagacttttccatttcttcgagcaacttcgtggacaacctccacagcctgttcgttcctccccttccccatgaggtattttggcgactcaaaaaccgtgaaaaacacaaaccgaccgacgaacatgatcattgcgatgccacccattgcgataataaaccatcgccatcccatgttttcggctttcgtacatccttctgcagaaccacaagtcctatacccaagcagcggccaaccaatcaaagtggcgacgacctgggccaaagcccagtcaatcgataagatagtcaacaggtactgatgagatccaggtaagaactcgagaaagatggccgagtccacgggcagattcccaccgacgccaacagaccacaaagccgcaaaagtacaaacggccgcgaaattaggcgatcccgccgcaaccaggccaaacaccgccgtgattccgatcgtcaagttgaacgcccatctgcgaccgaagacgtcgcatccaaatccccaaaacacagcaccgaccagcaacccgatgttttgcgcaagtgtcaaaagcggtgctttcgaggggtgaaattcgtttgagactgcggggaggatcagggacgtaacaatcggccacaagttatcgctcgcccagccgaatccgatcaccacaaagagctgccattggtatcggcccatgccgatcgtctgaatcgcttggtttagaacctcagctttggctttgtagttcgcgtcgggaccttcattttgagggacagctgggccctcgatcgccgttggctcaaggccaggcaatttggtcacttccggcatgttctgttgacaaagggaaggaggtaggaacgcagatggaaggggggcacacggcttatactataactgtccgcattctcgctctggcccccgctcgggtcgaaaattccatgcgtctaatcatatcccatgcagtagcttccacatcaactttattcaggggtctccttctttttccatcgacttggattggatggttttatggcgtgatggatggctagttttgtgtcagagtcagcgagaggaggttgtggcaatgccgtatgagctccgtggaggtttgacgagtcttcgggctttggcctcttcgcgtctcttttccgcctgaaggaacagtgcgtagtaacctaaggaggtcttatcggccatggatcttccaggggaataacgcctcgagataatacgaacccgatcgttgcttcatccggaaactattgtcaaccgatcacggctcccggcaggaggtaataaataatatagaaaagatgcctgctattccctaaatcgttgatccgctggtatttttttccgctccgagacaaagttgtgtcaccatgcatatataactattccacaacctgatacaacctgtagaactcgtaagtcccgaacacaaatggatcgcctgtcgcgtgtatgagtcttcaattagtcggattccataatgcttctgcaagataggtgacattcttatgatgcgtgcagtttgcgtgaagctgactgcacaaacgcgagctgacaggatcagcagcgctaatcttacatccggaaggctgactgcatttgccaggggtgccggaatacccaattagggttagccttgaaacaataccaattccagtccagatcgaattatacctcatatattccataaaccacctcgagtacttgagattgatttctcaacgtctccacgtggttcgtgaattgctgttggcaaaagagtatgctttatgacgttagatacgaagtctaaaatattgaaatacccctatggaacacttaccatgctgtggaaattctaatcagtccctattaccgttttagcctactatagaacatagccaaggcaaagcacttgagttgtcctgcatctaatataaccgtttaagcatgtctagcctgtaacatagtattgtccactgatattcaggcccgatggaagttgtacaatatggggccaaatcaatatctgagtaaattgtgtaaagagtgactagtaacatgatgattcgaagtttaaacttagatttgattgaattccaaaacgtagccagcaaattggttgaatccctccaaactgtccacatagttcagtcggaaaattcatcgaacccaatctagtcccattgtcagcacactcgctgttctcatcctagcatttagctccgccctcggtgccaccgtggcacgagtttgtgtggcagtcttgaacctctgtccactttccacctttgcactcgaccttttcacaaaaatatacattagcaaacatgaaacactattggaacctggacatgttgacatacaataccggtcctgtcacagccacagaagtgtctgtctccgtttgatgcctggcaagggctgtttgtacgtctttgggcgggatcatagccgcttccgcaggtgtcccgcttgtccaggaccgaagcattgacggcggtagcagccataagagtgaagaggatagcggtaaccttcattgtaaaagaagtgttttatatcaaaaaaagtggttgtgtgtctgaggaggttgattagaggcttgatgtccaagagtatgagtttctggaggatattgagacgtatatatacatttccagaacaaatgccaagtcgtatggatttcataccatggacagtttattcagattcttggagttggacgcctcgtgtgccaagtgccaaaagtatacctcgaagccagcaattggtcctggggttgaggttgaggttgcattgcaggaaattgaccagacgactctttcaggcccccgagctgaaaatgaaacgcctcaaagagatgtgtattatttactagaatagtagactatctatgtagatcaatcttggctgtttggggatacgatgagcatttgtgagaatcatccctacttgagcctatgcatataagcataacataccatcgggcccagaaacagcagtgccaaactggattgtccatagtaaaccgggatggactaagcaaccaatagcaaatagtggcccattgaagacatatagaatgtggtatagcttgaaaaacgatgatcaaattccgaaattccgaaattgaatttacaaccgcaaacccaattatacatcaaattaggtatatcatgtatagagcggccaggttctcgaataaaatacccaagaactaggagctagcgctctagccctggggatatgcaagaagacagacgaatctaatagatagtatcacatatattaattggttatacaaccagtatcacataactcgttaacctcacaaattggacttgtcgcatgactagaggctatcagatcacctctttcggctataaggggttcgtaaaccaaacctagggttacatcttcctacatgcatttttggctctttggcatttttggctttttcgcgggagggcggaccacgggagatccacacgccgccttttgaagagaccctttgcatgtccaaatggtaattgtgtatctttctttctggttcataggtaacagatacttacaatgaacagtgaattcctcgggattgcggtctgatagcaattatttcaaggggataggtatagcgactccctcttcagtactcaatttaacatgttctttgtcatggtgtgaatggtttgcctacatctgcaggtgcatggcccgagtgccagttgtgccttcatgcctgacttttgcctacttcctgaccacttgaatgtactgtaaatcatcgtaatatgaaggtcttttgtaatataccaatatcaggcagtaagacatcactatttaccggaaatggaggttagcccctggcatctagaccgctgcttactacagcccaggaggccgtagccccaggtcacgctcttgcaaccttggaatgttcaggtgagcattggagttcagcccaagtatgagacctaataaggcaaagtgactcgaactgtcttgtccatgtccgaggcaagccacccacatgatctggcaacgaggctgactacacccctctacgatgatctcacaagatttactacgtcagttcaaagttcaaggtgtttattgtcccggctatatacgcgaacaaaacctagtctccacagctaaagcaagccggttgtgcatttcggcagcagtgagtcctcgtatcacagaagaaacccgctactcaagccaaccgccatgtgtaaaatcacttgttcggactccggtcctcctccccatcatatccaagatgacatcttagatcatgagacgctcgacttggttcttgatggcgcggatctgggcggtcaggtcactggcctcgttggtagtgatggaggcagcaatcacgggacgggagacaccagtagcacggccaagagccatcttactgggaacgtaaacgtagggaacctaatttgaatgattagttttgtttatctggtgtagcgccctagggtatgggctctaggatattggactcacgttcttgtcctcggccaaaagaggcaagtgaagcacaatggcgagagggctggtatcggcggccatgatgacaagttccgaggttccgcggttaagggacttggtgcactcgtttgcgcccttcttcaattgacgatagtgcgccgcctgctgcacaagatcaagaaggctctgggcgagggcctcatcggcgatgggccacgctgcgctagtatcttcggccattgttgcgttgtagttgggaatttaaacaccagatcttgaagaaatggctcactcgggggatcacggccgtgtagttgaaacggaagataagtggaatgtagattgaggttaagttggagatgatcgtgggaaattttttgagagcggatcgtttggacacaccgcctactgaatttgcaagtatttctgcaactggttggcgctcaccgcccttgtttaattggccaccccagatatcccgccacccaggatgtctgcgccgaaatctttttcgaacccctacaatgtccacaggaataccacaattactcagtgatctgttagtagttacgccaaatctttctacatttcctcacttagatgtcctacaggcaataaatgactgcacaatcttaggcggtcctctcgcactgatcacatcaacaaactactcgagaaatcacaggtcttttcgtatcgttgtcaatatttcttgaaggcctcaaacccttaattcgtatgcaaatctatgaatctagtatcttgatatgctaattgtacagaaaatacccagccgcttaattggtgccgttcacagtggcagaggcaagtctagagcgcgcacgcagtgcagggccaaacttatacagaatgaacggaataaacgtcaagaccgtcgccaccaatgccaatatcaacccagcgtactgactacccacgttgtggaagaactgggaagcaaacaaaggcgacacagcaccgagtgtgttgcgcatgaaaccctgaccagcaatggcagaagaagagtgttctccgtaacaatcggccgtataactgtagcaggactcgaaaatgaagaagataccgatggtgatgagagccaatccgacgattggacccatccagtggagacccttgtactgggtgaagctgtagacaaataatccgatcggcagccagacggctccccataggacaccatacagccgatcttcgggtgagacctcaacgttcggattggaggcaatggagttgtatttgcgaatttgcaagaagtggaacccgaagccgatggtggttccgaggcagagagaaatatagggaagacctccgactccttcgccccagccgcgcttctcttcgaaggtaattggaatgacggacaggaagaggaaggccaggaaccaggcgaaactgatccaaagaccgaaggcaaagacgacgggctcggtgaagagcatcttcacggccttaacagaggagttgtgtaacatgtgtttgagcccaggggcttcgatatcattgaaggtcacgaaattgtcattgccggtggcctggcggattgccttcgcacgtttgcttaggcatacactaccacgggtttcgggcaggcaaaaaatgatgataataccaagggggatgttcgccaaaccctggataccctcgagccagcgccagccgagagcctggtcgataaatccggcgtagatgggcgcaccgactgtaccgagaatggcaataaaggagaaacaagccatcgggatagcacggtggtccggtatatacatatcaccgaaagtgccaccaacaagaattgtaccaacacaaccaaacaaacccagcagagcacgacatactaggattgtggcgatgttcttaccgagagcgagaccgatgaacataagacaaaagcaaacgtaggcaccgacatagacaactcgtcgaccggccagctcgcagaagggagcgaggaaaagaggagcaagtgcacatgtaaagttgaaggtgaaaagaccaagctttccaatttcttctgttgtccctagatccgctgccatgcgtgaaattccggaactgtatgctgttgtggcgagaccgatgaaaagtgtcatgaggcaaagctgactgctgatgaaggcctttcggcctatactccagttgaaggggttctgtttgtctccatccacgaagtccagcacgatgtattctcggccatcgtgctgcacaggccttgttgctgtaaggggaagatccacgtccacctcttgcaataagctgctgtcgtaatgctgggtctgctcttctgaaagttcattccggtactttccaccgacgattagaccctttgccgtgtgtgtctcgtcggctgacatagtgtcaactgagggaatattctcgtcatgggaagctgatataggttgaggatttttggaggccttcatattgacatagattgtggagagtgaaggttggaaaagctgtctaggggagaatcaacagcatggggtttggtccctttctataatttttaagtgttcctggctgaaagtcgcgtgatgtgagtggtgctccagactccagaatttgatgagaaccggggctgcgggattatacggagagtggggaagggaattccaggtaatgatcaattattatgctgccaacacggagaacaatgaagaacctgctgatcaatgaatgggttggaataccaagtaagtgggtatgacgaagactacgtaaaaatgctagtagcggggcgcttttcgtcgtcgtatgttggatacatacagtcagtccggtcactggggaaagtctcataacaagtctcataacaatgctgtctccaattctcgctcgtgatatgctattctccttcgcccactctcgtgcgtcagcatcagggcatgcttatgatgcgtatagatatctccggaacgaaaggattcatgtctcggatgattgccggtgtttgagttttccctatatcgccgacgatggtccgaataacctcccgagccgagttagctccacaattcaaagttattgtcggcatgccggttttgactcggattagatgcccgagtgacggaaaaaggtgtgataaagttcagcaaagaccagttgttgtgttataataactcattgaagatacatctatcctaactgaacttataagtgaagttataacaattcacacatgaactattgagccgcgcagtgacccactcgccacctgttccttcccagtgaactttccggtgagtcctattgcagtaggatttccgagatttgccccgtacctatgcatctaaacgatcatttccaataatatcatgtgcctggatcggtgtttcttcgccttccccaccagactcatgtttccccgcctaactctccggcttagctgtctaccggctgatccggtcatattgtcagggatcgttccccttcccacgtcatggtacgtagtacatggctcctcgaaggctagtaacctttatgcaatctttatgcagtatctcccattgtaacccctcaacttgccctgtcctggcaagaaccatacgcccaaacgctgtacacctattatatcgctgagggaatttcgacacctatctcatctcaacccttctaccagctcaccattgcttggcgtcgcaataccaaactttttccacctacatagtactcatatttaaacatcacttctgtgttccaaccaatctgaaaatcccacgcaatcaagcacgtagtttaaaatgtcttatataggatataggatagcatccattttagcctcaagcttattggccgcagaacgctcgctgagatctgacacgtgttgtaataccggaagagcacaaaccacattggatatctctgttaagatcgcacggcgagtctgtttaaagcacatactttattgtagaatgcgttggtagcaagcttctcgagagtgcttcggtgtaggtatagatagtgttgagagggagtgatgccgacggcgctcagtcggatggaggaataagccttgggcgacctgctgtcttggaggaagagaatagtcgattgaggagttagccgatgtttgagtttatggaacgcggaggttgtcttcgccttcatagccagtggaaccagcttccatcgcaaagcttaccgaattatatcctccatgaatgctcgattatctcacctgaccggttcaagtaaggtctcatctccaatatagcagtatgcatcgcgaagggaggctcggtgacaacggacggtgacggaaggaaatgaatgtgacttatgaggtgaactctgaacttttccgtgtcgctgccgcccagttgttagaattccggacgaagttagcatactcgacgttgtagaataacctgagggggtatcagggaagtcattaaaagaatttggaagtccggggtaaggtgtccaagctggtcatagttccacggtcagtaggggtacaatgtgtacatatagcaatacccacagtcaactccacggttctgcaacgcttttagattctttggggaaaatgtttataatttcgtacttttagccagattcaaaacattcaacacagttaaatcatttatccaatctaagataatgctatattagttgcccaagtcaagtatattccaccaatcagcatgttagctcaggggaagagcgccgggctcataacccggaggtacgtttcaccgaacccaatttgactcacgaacgtcannnnnnnnnnnnnnnnnnnnnnnnnnnnnnnnnnnnnnnnnnnnnnnnnnnnnnnnnnnnnnnnnnnnnnnnnnnnnnnnnnnnnnnnnnnnnnnnnnnnnnnnnnnnnnnnnnnnnnnnnnnnnnnnnnnnnnnnnnnnnnnnnnnnnnnnnnnnnnnnnnnnnnnnnnnnnnnnnnnnnnnnnnnnnnnnnnnnnnnnnnnnnnnnnatgctatgtctatttttttttttttttgccctctcttattgtcctcattcctttcttttaaaggtccttttttgctaatacatcaagcatgtcatatgtgggggaattatttgaaagtccaatcgtcgtgatcacccatgcagcattccaagttaagaagtcttcatgacatcagtaaccccaactaggtatcattttgatcaccacgcaatagccctggggctacgattccctaggtctgtatgagatcgttaagaatatcatgacatacttgactccccgatatagcctcacatgcaaggctctttcattcatctaaaagatgcctggactttgtcctgcctgagagcatcatactgatgtaatctatgggttcaatttacactagtataaatatctgattgaccatgacccagacggaagtcaatgtaaggcttttcagttctctactattttggaaaagatgacggaccctaattcagaacaccaccttcacaggtaaggcatcaatcccatcccaaccggtatcatgatgctcacattcacaaggtacggcaactggatgccagcagactacaaagctcaccaagaatggctggggggaataatcaagaaagtcgacgacgagtctcagaaacccctccacccggtcctagaggaattcagacaactcatcgaatcgaacactcgcatatacatgctcttgacttcaatgttcaaggaagtcccacggaagaagcgatacggccacgacgtaacgggaaaccctgaaatccgcgactataaccatttcctgcgtgttctcaaccatctcctcaccactgcgccttcctggaccgacaaggcaaaccgcgtcgggctagtcggtttgcctattaatgccgtcctcgactggccgatgggtacacctagtggatatgcggccttcctagatcccgagatcaacgcgatgatcaagaagatcttgaatgtgtggggcgaattcctgcgctctcccgcttccgccgatgtgctgaataacacctctcacggatggttcggtaagactggccgtcgggatcttacagctgttgcaaagatcggtccgctagcgcagacggaactggaattccatgacatgtttgaatgtgacccatatgctccaaatcacggcttcaagtcatgggatgacttcttcacccgcaccctcagggagggaatacgccccgtcgcagatccggaggacggaaaggttatcgctaacgcgtgcgagtcgaggccgtataggattgcgcaccatgttaaagtgcgtgaccacttctggatcaagagccagccctactctgtgctcgatatgctgggccatgatgaacttgcgtcgcagtttgttggcggcactatttatcaggcattccttagtgcgttaagttatcaccgttggcacgcgcctgttagtgggaaggttgtcaaggcctatgttgttaacggcacttactattccgaaccgttgttcgaaggtgttgggaacccggatgttgagcagaaggatattgacatggcaggtcaggtcacttcgcagggatacatcacttcaaccgccacgcgagcactcattttcatcgaagcggatgagccagccattgggttggtggcattcattggagttggaatggcagaggtctccacctgtgatatcaccgtcaaggagggcgataaattgaagaagggagatgaaattggcatgttccattttggtggttcgacacattgtcttcttttccgaaagggtgtccatgtctctggcttcccagagcccggactggcagagaacaagcctgttcgaagcaaactagcagtcgtctcgtgaggaacagaatttaatgctcgaattgcccatatttcgggtagaaaagttggacttcaataaagatcagtatattttcctgcatttatggtaaatatatctccagtatttaaaaccatcggcagcctcataaagaacgagccaacgagttttctgcacaatagactgcgtaattcatcgtttactgaatataacatcaagtaaagctgcttcacttccagattttcgattcgatttactacaagcgttttggctctgggagcagtggaaacaggaaaagcacgtgatctatcatattgtcagcggttgctccagcgacaatctcggggatactattcccaacaacattagctacttatcgcgagtctttcagggaaaaatagggtcaactttgcagcagacaatgttgcgtttaactcgccccgatgtctgccgggaaaacccccgcgatcttgtcttgggtcgaagaagttgcgaggagcgtgcccgaaaccccgcctaataccgaaagactggtggaaaacgcttcaactccagcatctcagcacaaacgcaagaggtcggtgtttgaagccgagaatccgatgtcgcagtcagaccctcataagatatcctaccgaactacctctgaaacagcatccaccgtttccgtccgcttagctgacgagataatctctctggccccatcaagttccgcggccagtcggggtggtgggcgatcacgctcatcgagtccatcacgcgtgaaggctgaactagccacagccatccctcgggtggtctatatacatgaatccgccgaccctaaaagccgtgctgcgagtcagctactagcagatttaacacaagattctgagttcagtggaaatgaagatgttgctcagaaaatctcgagtgcttcgtgtcaatgtgccacagaattccgtagcgaaggctcttgggtgcataaggtagcactgccgctattggagagcgctattgcagaactaccgttggagtgttggagcatgtatgtcccacgaagaccccgtatccccctggttcttgctaatttctggcagtcaaacagagtccgttgacccccagtatcaacctcgttatacagcccgcgatacatataaccgaaaaattgatctggttgtcggtcttcccgtgaacgcttacgaagttcaatatgaaaaggccgggttgcatacgacagggaaatacttcagccatatgacccatccgcacactggaaaacgtgttctgggtcctggtgttgaaattaaagccgcagatggaaatttggtggaagcgcaagtccagattggggtatggatgacaggacttctaatgtgggcattcgcacagcgtaagagtgtcaaagatttgcctccccttgttgggtgcactgctgttggagaagactggaaattttatattgcaaccggagtcgaagagtcgggtgtcttgaaagaagtagtaggtaatatgcttcagtgacttgggtacaatggctaatttcttctcctacagcgcatctggggccctttatctgacttagacggccgtaccacaagtgtgaaacataccacgtctcttttaggaactcttcgtcgagtcatggagtacacaatcgggcagtacaaggaagggattttccgagcaatcccttccgtggtttaaaagctacatggccattgcaaaaattcgtcaaataacgaatttcacgaatttttttatccccacgcctcgaatttgcttgatatctggaagatctgcaaagtataacgcatgcagcctgtgatgtcatactaaacgaacggggttctacgccattttgaagcatccgtcggcttcactcgttggaatttaatttcgggatggagtccaagtttgcgatactcgcgttttgtttgcttttgagccatggcttggctgaacaacgccatccccatgctggatctcttggcgatcttcgcgtattgcactacaacaacctcggtccccagaacaatggcacttcagctattttagcacacgatcgctcgagctatttcgatgctgttgcaaagtgcattgccataggggagaagctcttcccgtggtcttcgagtgaaagcaatagtcaaattcactccgaactcggttatgaactagactatctcatctttgcaaaagaaatacgagatgatgactacttttggctgtcggaggaagaaaatcgcaaattatgttctgctttctcgatcgcccatcgcaagatcatacagaaaccatgcaatgtgaagctaccagccctctgtacctcaagtccgcccggaacaaccgatcgcgaccgagccgtaagggaaaccacgaaactgaccgtcacatcccacgattataccctaaccggatatcgagatgcgcgttccttccgcttcctcggggtgcccttcgcgagtcccccaattaatgacttgcgctttgccccaccgcaagcctacaccggatcgaacaacatcgatgcgactagcatggggaattcatgcatccaatctgcttcagcccttagcactgtgtctattggtggaatgtctgaggactgcctttacttgaatgtcttcaccccattcctgcctcacaatatcaccaagaacaccgcccttcgccccgtggctgtttatctgtatgggggtgcattcacgaaaggtaccgcagctatgattgactatgacggaggaaacttcgccagccgcagcgatgtggtcgtcgtcacagttaactatcggcttggagcattggggtttttgtctacagggaagctgacaactgggagctacggtattcaagaccaaatcatggctttgcaatgggtacaaaagcacatttctgccttgggaggtgatccatcgcatgttactgtcttcgggcagtcatctggtggtcaaagcgtggtagctctgctctcttccagcgcagcgaaaggtctcttctccggcgcgctggtgcaatcagcaaacttcgacctgccatggtttcctcgcgctctttattctaaatacatcgctccagaagtcggaaacgcagttggatgtgacggaaacgccccagaagcaaccctcctcaactgccttcgttccgtcccggcttcaatgtatcttgataactcaactgatttccagactgctacaaagtccttctcatccaacaaggcaaatcacttctaccataatacagaactgctatccgcaagtgaaccgttcatgccgatggtagatgacaccggatcaggcgttatcgacgaccaatttaacatcctcctctccaagaacaagctcccaatcaacgtcccgaccatgttcaccaatgtccgcgacgaagcaagcctctacatggccattttcggctcgacccagagcccactcgctacattgcttagcgttatattcggcgataccctcgctcggaaaataatatcctctggggcatacaaggttaatgattccgatcacgatgccgtcttaaacgctgcttccgatgcagtatcgcacagtcagtggacttgcccacagggctatcttctcgagaattccatttccatctttcctgtcctataccaagtccaaatagcagatggtcatgcagagacatcaaatatgccgggcatctgttacccgaatactgcgtacaatgcttcctgccatacctcagatgtcttgctcgcgtggggtaccctgaacaccaagacgcaagatgtgtatccgtactacgatgatttggatattcttcactcacagcttgttcatgatgtattcggtgcgtttttccgcgaaagaaacccaaatccggatctggagttcttgaagatccgtggtcctgcgtatgcaagtactctctctatatttggtggagagtcggttggttcgaactcttcgtttgggcgttctgagaagcggtttcttattgaggagtatacggcttcaacacgaaatatgacgcttttgggaatgccgccgtctactacggccaattttgaggacgaggagatttgtgctgtgctgcgcgattatggttttactttccagagggcgcggctgtcggattagattcacgttgaattcggtttgggttattaactaaatcgctacaatgaacgattcttgaacatttagtttcagatatatatgatgcacattcaagttcaagttcatattcgtgtgcgttgatctacttgagcttgtcattccatactcattcaaatggggagtatcataggtgcaattaagcgagaaaaaccacaagaaacaaaacgccaattaaagaagtccgccagacataagaatggaatgctaggttcgtcgtgaaaaagatgagtcgccaaaggcaaaatgttgtgatagagccgatgaaaaccaaatatccatatgcccgaaaatgaagaaaaaatgaaagagattcgttaaacatcaacgtgcagcaagtcgtgagaattattcgtaaatcggaaccctccgtgaggggatgtatccgtcatcttcaggaacagtggcaggaggatatcgctttgaaggggagctgcgagggctcgcccatccagttgtacgggggtggaatccagcactgctgtatgatcgcggccgctcagatccgcttcctccgctactgggtcgactattacctgtacttccgccactataacttcctcttctcatatcatctgcggcgtgagtccctcgatgtctcggtactgctcttggcggaggagttggtggcctgtagaaaggtgggtctggagcagctggagcaggagttgagtcaccgaatatgaattcgcggaatttgacacccgctgtgcgcgatcgagaacggtcctttgaatgttcctttcggaaatctctcggatccctatcccgatgatctctcgggtgaaacttcgatgaaggctcagagtgggatttactagatcgtgaagggtaagtctcatacccgcggcgatttcgggtagggcttatcggtgacagatctcggaatggcctgcgagtgtaggcttcgtgggagtgacgtctggcattactgctagaaggtggtgagagatgccgtcgggtttggtgcttattcggttccgcacggtccttgcggcggcgtgcagactcatctgaagacacatcagagacatttggaatatcacctgttcctgggcttagtggatggccgtgccgagcaccttggtctcgtccgcttgaatagggcggacgctccccccatgggggaggggatgaaactctcggggtcgaaaagcccggtcgactcgctctaggcctgcgtgtagagaatgcgggatattctccactatatcgtcggcggtgattgcgatgatcggtgggccgatcgggctccgcatgactgtggcgctttgacgccgcccggcctgaacgcgagaaatagtcgtcttcgtcgggcagaggatccttgccactaaaatggtaatgatatgtcccaaagtctggcggcgaagcacgcttcgtgtgtcttttcagatagtcacgctccaatcgccgactcacgccttcatgccattcaagcatctccgggtcaggctcagaaggaaacgcgtctcgagggatcgtcttgggaaagatctcgccatttgcatctacaatatcccaaaggctgactgcattctgcaaatacactgagtgttcatctgggtccatcaacagttgtattgtctgccaccgcacgaagccagtcggaagtagcgagggaattgatgggggttcgtaagggttggctgagggttggagactgtggaaacatcctagtgactggtagatgaatgacagggcttgtgccttggtctcaaggaataaagggtcgtagttgccgccgaccttgcggtaaaaagtagcaagtcgatccggggtgatatcagtggtggcgttggtatcgaaggagcactttgggtgtgttattttggtatccaatccacttcagatgggtctagaacttaccatcaactgcgctatccctagacatagctgttctagcagcggggctgggcttttgtctgaattgatcagcgttccccagttaatatctgcaaaagccatgaatgtggggtatgagatattgagaagtgcatgcaagccgactcattaaagcatttcatctcacaggcttcgaggttgggcgcatgtcaagagagaggtgacagcgaagaggaagagagcggtcaggcacacacgggacccactgcggggaaccaaaggaatgcgaagtatggaagggatatgagtgaagtatatagaatacaaagaacaatgaagatacttaactattagaagatgtctgatatctccatgagttgcacggctgagaatacatgtgacttgatgtcacgatatccgtgactcatatacatacgctgcatgactgtgaagcctgatgtggcgctgtagatctgacccaatcaccaaaagatctcaattaagggacaataataccctacgctaaactactttaggtaaggtgtatctagatccattggattagacgaaattggttttgagctgagattttgagctgggattttgtgctatggacttgcggctaattatctgttgtaatccttcctggtaccctcgctaaacagtacttgactatcatgacatgaaaggctttaatgaccacgatgtaggccttcccaaggagcccatgacaatgaaccaccgttgttgcgaccatctccttgccttctctattattgtccttatagcccgttggaaaatgctaatctcgtgtcagaattgaaatctgaaagttgagatgactgtcagcctcccccaagacaatctcgttctccgcgcgcgagatgacaggaaatactgtaatagtatcgatgccttttttctcggccgctgcctgtatctccgtggagcgcttcacgccaaagattgacataactccatctctaatccgcatcaggactgaaaaccagacaggttgtctcgcaaagaaaagcccgcgcaagggcatctgggctgtattctccagacttgggtactggaagggacacagcaaatgcgtcaacaaaataagctgatttatatgacgatggcaacctgctttcacttggaaaggagacggcacgaacgggtgctggtagcatttttccttgcgctgagctagtgtgtaaagaagacgagattgggatataaagaagcgagtgagagcgcggtcgagtttgtgctatggcgacgcgaagctttgtttgaccaacaagccgtggaaatgaaagcattaagttatgtggcttatgtatcaacatggctatgaagacgatcgaagggatgacaaccgttttatcgagggtatgatccgtctagtagtctccgagggtacccgaatagttgcccgtaaacatccgtattgaagaggggaccctgccacggggacaggggcaccgacagccctgcctgcaaaacaggtgtgagagcagagtattcactgggagtattaggttgctagagaggagaacaccatggggtgactaccgagaagagaggtggaaaggtgtctgcgttgctatctatgcctcgggagtgcttttatatcacatagccgcttagtcatcctgctctgggaacccccactgcaatataaagtgcaggtacctgattggcccaaggggccatatgaaaaaatcaatagacattgggacgaggtgtcaaggcctaagcgggacgaaaaggcatacacacgagtaactagtcaggggcagacatcttagtatcttcaaaactgcagtgggggtttccagagtaggatgactaatcggccatgtgatatgaaagcacctccgaggcatagatagcaatgcagacactagacaccagacaccagacaccttcacttcccagtagtcaccccatgatgttctcctctctagcaccctactactcccagtgaatactctgctctcacacctgttttgcaggcagggctgtcggtgcctctcaggggtcccctcttcaatatgtaaattaataaaaagtatgctaagtcctctttctgtagaacttgctgaaaataattgatatctcagaccccgtttctgtaactttcattgcaatttcagacaaatatagtaaactaaggagaggtcattcagtctaaactcccgaactgatgcccaaatctctataaaatgccctcaaatcgggttgtcgaccaaggaattctgccattgtcgtgttctcattttgactgcctcctttttctagagccaagtgcctgaatcgtctcattggggtgtgattcaatggatttgtttggaaataggattgaaatatatcgaccgaataaattcgcgagctggaaagtgttaatatgagcaaaatcatagacttgaaagccagcgagaccaaatatcttactatatgtatccgtaatacctagcatcatagcctgagacaagatgaccgaagtttgcgtatccatgcccccagtcatccttttcatcgcgcacacaggagctattcaaaccaacgacttggcgctggaggcgattgtacagctttgagatggaggtggtgttaagggcttctgaatcgccgatttgatgcactgccatgtcaaaggttgcgaaatggatttgttgcaaggttgagaggacgcgatgtgatctttttgcgttaatgaaattttggagcaatgagaatggagatatcgatgatgtagaggtattgacattgttattatgcgtaggtcgggtggtggaaggagacaaaagagaaggcgagctgatagaatgcagtatggactcttcccaacaccagctttcgagtaataggctagggatctcgacaaagtccctcgccaccctagtgccatggaaacgagagaacgtggtttttgacaccaagttgtgaacagcatgtccaaattcatggaatagagcaatcagatcatcgaattgtagattggcttggttgctgatggtaggtcttgcaaaattactgaggattgcagtaacaggataccacctggttccgtttgcgaaagtgaagccaggctggaggagaaagttggcgacacgaccaccgaactttcctgccctcgaaaagagatctagatagagataacccagaaagggctctgtacagttgactgcgtcactgtcatcccaaactgcgaataatcggacgtcctcatgccagacaatcccattccgatctttcgactcggttatcccttcaaatctgattccgaatagccttgctaccatctgcataacacgccgtagaacatgttctaaagggaagtacgccgataccagtgcgtcaatattggtgtgagcatctttgttcgcttgcaagcggctgtagaagtggtggtcccataactgataagagtcactaaaggtctctgacatttcctccagatgaatccgtttgacctccttcaaaaaggcaatctcttcctgtccggcagcattgagatcttgcttcagggcccagagcaatttatccacatcgcggaacgatctcaccatattgcctaccaaggcaccgtctgcatgattctgaaatcctgctatcctggccgcatcattgcgtaaattgacaatttctgcaaatattgccgcattctcgtgattcttgttctcatttgccacgtacaccctctcccgtgtgtgtgatcccgtcgcagatcgcagcacaagcgagacctccgctcgtcccaagggtatcttgaacaaattatcacctttagaatccgattccaacttccagatggaaagccactcatccgatacaccttccagctctgctctgctaaattccagcgtcggtggtggatgcttcagattctcctcatacgcatattggagttcgctgagccgtgtctgaatttggttatattttgtctgttctgatgggttcagatgaagaccatgttgtcgaaaacatctcaaccgatcatcaagaaaatgctgctgctctgggaggagggtctgtcccctttgcgctacagcggagacgagtctgaagatgccgctatgttggcaagattgcctttcgaagctctctatcatcttcatggactcaatagaagcgttgtgcacatatgtgttgctcgtcacggacttatagaatccaacaatatggtatctgagtccgcacagattttcaaggtttgctatgggcagcaagacgttctcgaacgtggctttcgtttcattgacatcttgttcaagggaattatataattctctgctcgtctcaatacaatattgaatgtcttccatgatggatgatggggttcctagaaaggaaggtggcgcctgtggcggcctgcattgcacatttgctgacggctcatggaatggagtggaattcttggaatcggatattgcttcacctgcagacgctttggcaagttcggatgatagggttgaaaattcttcggcccaaatatagaatagagcggtggttagaaatattatgccgccgaagaagatgaacgagacgcgaagcggcggagccattagactgagttgtgaacgacaagaagatatggttcatggcaaataggaatgaatataggggtcttcatttgattgtgagcatctgtgttcaaatgttttgcttagactgtcacatcataggctcccgaggtcgggccagactaatgcatgattacatccttagtgccccatagggtaatcaaccttggaagttgcatgaatgattacccgtaatcaagtaacaccagttgacggaaatatatagtacgacaaatgtaaggctaccttcggtggtgactaagtaaaactaacgggttgacgaattgtagcgcgtagggtcgttttggcctaattgaggctcgaagaaaagtaaggatttctgaattaccattgcagagagcttaataatccgccagccttaactaactagattggcaaaatggagcttttggcgccatagaagttcacacatcactactttttggggtggtaatatatgaatctttcatgttcatggggtcatcgggcctggtattgttacgagccaattcgattcagaagaaaaaagtgcaattcaaaccaaattctaagtacgaagaagaaaggaaaaagagaaactatctgagtgcgcgttctccccttcttatactcttgcgtttgtctcgtttaattcctgtttgtcagtttgggaaggtacgagggcgtggtcgttccttcctcgtttggcaagtacgatccttcccagatcgtcacagttattccgtcccggcaagggtgtaaaccgatgcccaaaagcggtctaaattgaggccaaaaatcaggcattaaggcctcatttaggccaaaacgaccctatgggatagttgactaactaactagttaactagttacccgccatcctatctactagtttgtcatccaaggactagtttcaagttagtcaagtctacatcgtaactagttgactttaaaaaaaggaataattttcgcataaggcaaagcacgaagagactgaaagcaaccagattgaaatttcaagaaagtagaaaaaagtaaaaggtactggggtaaccaaatttaccctacgcttgctccacaagaagggttgtagagatgtaagatctcaaggaaagaacgcctgcagtccgagcatccaagtatatcttccggtccaagtatgccagagtctggtcaatcgcccaaaaaatgaacaagctagtcgatatgtaggtctcaacagcatcacatcgggtgatcgattcaccaagatccgtaagcaactgagaaaatgaccgaagctcgtccctcggttcagaaatttggtagggatactgttcagctgcttcttgtagatgccccgcaactagaaccgcacagtttttcaagacggatggcctcatgatgtccaatggcgtaaattcatagcctacaacatcaagaaaccatttctcaaggcgattatatatggtatcccgcgtgagacaaaatatgtgcttgcgagcaggcttccggatttcttcccggccgtcttgatagagcttcaggtctaaaagcccatgtttatcgtatgacatgacgttcgtcagtcgattcagcaggcatgatttttccatccgattttgatcagaagtcaagaaacaaccccgatcaaacttgacggaggtggttgagggcgcgctgataacagcctgtttccatcggccaaatgcttcgccgctgagagtgagcctcgatgcatccagcaatttggacatgtgaccatgactagaaatctctaggatttttttctgaatcacggaggcctctctcgcgagtactgccacaaattcggaattggaattattctcccaacgacctaagatcatatcgaatatagaactttgccgacctgcgtctccttcttggacggggagcaaggaaccgggactgtcggatatgagatgaaacgccgcaataatgcaactgcgagcgctcccatacttagtccgatagcgatggtgaaccaaagaaccagcactgaatgcaaccgttatcggctggtctgggtattgtacttcaacaacacatgggctttgattgtatacgcgcttctgaaacccaaagacgttttccaaggaagtttctgtcaagaatacactgtcgttttttgtcgaccaaggtctaccgacttcatctaggcggatgcggcgattgccgagatgtgtcccgggaatataagtgaagttctggcccgtcgggcctctgggaactccctttttccacccgacaagaaccttgaactcatgtcggaatggagtgttgtcaatgtgaagcatgttgtcttgggcattgactgagattggttgggtgtcttttcctcgcacatcagtcattctgatcgcaccgcccatcgtatatgcaatcagagcaaccaaaagtgggtgaatgaacgcgtcattatagatcttgttcttcaaaaagcttggatgttgggagagattgaggaacgaatgtaagaacgcctcactgccggatgtcgccatcgcttgcgtgtagtccccaatcaaggtagtgaatcgtgctttgtcaatgagaccagcaaatacagcacatccctcggttttcagaacctcaactagctttagaaaggcactggtagtgcgggggtcgtcccaggcaccagacaactcgtggatgagtttctgtcggaaagcttcattttcttcctcgttgtggtgctttctgtacttgtttgtttcgaggctcacagcaggactaggtggcgcctgggcaagatgctgagcaactagattttgagggtcgatactaggtttgatttgaaaatgcagaggaaaggtgttgtcgtgtgtggtaccgtttgtagtctcatcaaacactccagttgtcgattggtgataaccatatgggtgttggtgcttccaagttgcctccatgatgaaaacgaatgagatagtgtttgtttgtgaactttggctagttggagattccgcctcttctgtccgtatatgtaagtgcttctcgtcatgtaaaaccgtaataaacacgtgggtgtaagctgattactcggtggagagacagtcagctcccgagattgttacctgcatagatgattatcaggtaatcaaagtaagcagaaaaaaaagtgctgccatgacgatatgatcgcataacgtgatttgagtctgacaatgcatctttttatatcattaagttttctataggaacttgaacccgcttaggagaattctacgccctgacataatcggtttttccacctgttcctttacaatatgttctcgaatcaagaatatgttcagttgagaatggagataccagcagaagactgtgatcaagacgacaaatgttcggtcacccggcacagaatactcagggactggtggaagattctcattctggtcacagcaacttctagcctgatttcatttggttctttctctctcctcggataccatatgggaaaagcctccaggtccaatgattggcaacatctctccaacattcaatgtggcaccacgttatctgaagctcaagagctaggatgcgagtttgacctcgtcaccaacaactggatgccaaagcaatgcgcggatcccgatacaaccagagagtttcgcgagtgggtggctaacaatgcacgccttcaccagtcgtggccttactaccttgatggcaaaggagaaaggcaaatcgcctcagaagaagatatgtccaaaatgatcggccagcgactatacacaaccacggagaaccacttgggacattgcacttttctcatgcgccgattgcaccgcttcataaacaacggtgccagtattatatcgcaaatcaacctaaatcatacgattcactgttcctctgcaattttgcaggcgattggtagtcctgattgtgatgatcgtggcaagattacatcgggattcgatgtgggcattggtggatgttagagtgtgcagcatatgggatccacattgcgaatgtattctgtgaaggatgctatccttctatcacaggaatccgtagctgagctggtaatggtacgcaagcttatcatgcatagttattattattctctttttcggggccaaggctgaaacaatgatctccatgtatgtaattcaaagacataaatatttaatccgagtgattaccaccgaggtcaggatccagaattccctcactaaatccatggagttcctcgggcctcccgtctgccatccacactgtagtgtctactcccggtctcaattctttccgcagggtgttgagtctgtgagaaatagcgatggtggtgtgcccttgattcgtaaaataatctctcaacatttcctgcatcttgatatccgtttcgaggtccaaagatgagctggcttcatccaggaggacgattggctttcgttggctaatcacggggtcaggattctgagttgatgactggacccttagtaacgcctgtgtgaaggcgagcatctgcatttggcccgtagaaacgggcgcaaaactagccagcggttggtcgaggaaccctgggtttgtggtatccagaacaatcccgttcgttgtccttcccaggaaggtgtctcggagctctgaacgagatgcctttgaccaaagtccagtctttgaaagcatctcgagaatggtatcatcttgatgttgattgtagggatcgagattgaatcgaaggcttgcgtcgggaagtatgaaagggtcctgaggtaaagcaacaaagcagcgtcgccgtacaacatgtactggcaagcgagtgatatccacgccatcaacctcaattgttccagtctggggccttaataactgcagcagcgtaagaaggagactgcttttcccactgcgaccagtgattaaaaatttccagtcagcttcgaaaaaggagagtgatcaagagcttatcgcgacaactttaaagtaccttccagttcgaccacacagaatgacacctgacccaccccgaatgtccatattcacctcacgaaggacgggcacatgggaactgcaaagaatcttgtcagtcttcggtctgctatgtccttgtaagtgagactaacttatagcctgctgatacgtgttttattttcacggaacccatatttggccactcgggagagggctctaagcagtcccaggatttatcttccgagggggtgtcttcatcaacagatcgcagccgtgaaactgcgccaagggaggtctcgagggttgtccaattctcaaccaggcgaagcaatgttgtgtttgcagcaataaccatgttcagcgcaatgcccatgtcagcacctgtggctgtgcttcgaaatatcactgccgaggcaattaaaatcacagcaatccctgcaattaacaaatctagaactacattgagccacctctgcaaacaaagcagaagatacaatggcctctgtgagatatcgagtttctcgacgttattgatcgcaaatctttcttcccatccaaagccacgaattgtagcaattccttcaacctggtcaggaattagcactagtcagagtagggcccggtatcttctgcgtactgtctctaggaaacttgtataaagtttttcctttgactctaggtcaatgaaacgcaattgccgagaggttctgagatatgtttgttgaatgaagtatacacaaatagtgcagagcggtaaagtcattgctatggtgggctgagccacaaataggacgatagactgcatgataagcttgaagatctctggcacctcatgtttagcatgagaaagtggctggcacatgtggtactggacatacggttgctgagatttgcgaaggctgaaggcatttccttgtcgaccaattgaatatcttgaccgaatctggagtatttgcaatttagtaaatctgccatcgtatgaaattaatttgccagacctattcaatatggtaccaatatcaaaggtcgaaaagtatgaaagcggtgcactattccaatatcagtgaattgctgaggaggctatttttgaaacatacttcattattttgccgagaagtcgagaatgcagagtagaaccggatcgtggagcgatgactatatgtgttgacctttaaatccggttcagtcagacagctggattgacagaagagaggtagacaaaccacatggtcccgttggtcgctatccaagccattagggatagtaagaaataaatcagaatatacaacgttgagtttgcattgtcggattcagtccaccacttgagaatgtactgtgcgaaagtaagacagaatgcatatatcgcagtgcaggttgccatgagcaacatatttgagatgccggccgaaccaaaataatagccttaattttgcgtcagatattttcagcgtaggactagaggtagaacttaccgtagactgccaaatccccggttctccttaatttatcggcagcggcatcatctatctgtgttccgtctctctgtgattttaccgcaatttctgatttatcagcctctgatgtacgttgtagaacatggctcgtcctcatctctggctttgtctgaagggtaaaatcagaggagctctggacttgtactttcccttcattgagcaaaattatcgtatcggccaggtggtagtactgagctaagccatgtcagaaggataagtcacggacaatgaaaggggccgaacgcactgccacgagtgatgagaaagacggtgcttttcattttgcgcaaaatcccttcaggaccaagcaaagcatgaaaaatttgactctcgactgctgcatcaatgggactaaacggatcatccaataccatagtacagcagcgagagtaaactgcacgggcaagagcctccaataaccttcttagtggtttgatcactggatggtctgaagaagccagaacttacaatgcgagatttttgccccccagaaacattaataccaccacttccgacccacgtcatatctccgtcgaccagcgattctaaatcggcaacgagacggcaggcttggatgacagtctggtaccagtccgcatcaaatttgcttgattgtccgcaaatgacatcccggatggaggcattaggaagccagacagaagagctgcaatatgctattctatcatgcgaaatagtaatcctgccctcagtgggatttatttccccgagaattgtcaatgccagggctgatttcccactaccaatgggccctgagcatatgccaatcgaaccttcggtcatctgaaggtgaacatgctggaggacttgatgtgagctagagagctgtatgctgacattttccaatgtaaatgccagttgaggaccaggttgtggtttgtcttttggcctggaggtgaacacacgctcatcttttaatgatccctgggtcaagtagctttgtattctttcgaagtttgccaaagatgcaatcacacgaggtactatcgtcatgaccatattggctgggtgagtgactagacctaggagagcgatcgaggtgaagacaatatccgcatttggggcatcattttcactgcgagaaactgcaaacagcaccaaagtcagaaccggggagaatattcctagcgcattagctaaagagatggacgaatagtcagcttcaatatattggctagagatttcgtggccatgaacacctaggaataacagagtcgaaaagaattgttggtcttaccgctggcgttgtatgctaccataatccatcgcaatcttatcgacttcgcaatctctcgagctcttaaattggagacaaggaagctagtggcctgatcgagacctagaatcttcatacttttgataccccggaggaccgaggcaagcattgaaaggcgatcctgagttgcaacactccaatccttttgttttgcctgaagatgttttgcgacatatgcgctcatttgtgaacaccctagagttagttagcgtttgtctggatcactggtgtctggtgtgtgactatatcataccaaatataatcagcaggggtagtagtgcaaaccatccaagttgtcttccaaggagcgcggttccgaccaatacttccacgacttgcgcccaagtctcatggagcatttctgcagaagtgtcaaggctgtcaacatctgcactcataagtgttaaggcatttccgtcatgtataggagagcttgcggccctaagtgacctagcatgaagaaggctaataagagccccacgcgccataatctgcagtcggttgagcttgtgtcgatataccgatgtggaaatctatataatctcgttagatatcatgattcgaagtggctccttagaagacctactgctagaccgcaatatatgatagtggttagcacgataagccaatatcccgaatcagtgctctcgtgttgaggaccgtcaatccgcacaaaagtcatagcaatcttaatcagagtcggctgtgagtaccgaaaaactatcaagaataaacgcggtatgataggtgatagacactctacccgaaaacaatcaaagagaacacaaggcaaggtgaatttggtctctggctttgctggacaaagcgttaatgacctcattattccaacattgtggtaggcgatacttacatctctgtgtccaagcccgtacgagccgtttccgtaagatcctcgaggatagagctcggtcgacttttggtaggtcatcttgtgtcaaaagctcatggtaaccctccttgagaatagggttgatccaccaaaacagcgcacggccaacaattcctgtaagttcctcgggcgcaagatgtttatagcgaggctttagtattgcgagcttgtttcgaagctccactactagtaggctgaactccagcaccaatcttatgctcaggagcattaggcctgcagttctgagatcgcccgatggtatggtcagggcaatgagatccttgacagaacacagggccacgtatagagtgaccggactagatggccgcacagtcctgcggtgctcaaagaatgacaatataaaaagctcgaaagtagcgaaggttgatgcgaataatggagcctgggaattgaaatcatctgagaggtttgttatttcgatgagggaaatgatttgggtaatggtaagccccaggactaggatctattgactccaggcagatgcattagcaaatccgaagaaatttttgtagaaagaagaagtgatatctgactgttttgatatggccttgaagattaggaaccaccttggtagctgaaccgcgtagatcccacaactgcaaagacgcgtagagcacgaaggtcactgataccaacaatgagtacagattgagccagacagacatggtttcgaggaactatgttgcgtgtaagatcgatttcagtggattgcagagttgtgagtttatgtttcttcgacacataattagagcttctcttgtcaccgccatttttttgtcttacagaggattgtaatcgtggcttctgagctaggccgcatgattacgcgctagataaattactcggtcccacaaagtacaaagagacccctgctaagatgacgcaatatcgggcgttaatttgtagttggagccttggaatgtgcattttccaggtacatagatgtttcccaccattgcgaagggtatagcggccaggggtcggatgcaatgttttattatgcgttgatgcctgaagtaggccttatttttaactccctttacaccgctctatacagtactgtaaatgaagctattcatactatacaaattcctgtcttcaccgaatttcaggcagtgagagcaacgcagacaccttccacttctcttcttggtagtcaccctatggtgttctcctctctagcaccctactactcccagtgacgactctgatttcacacctgtttcggaggcagggctatcggtgcccttgttgtcctcgttgcagggtcccctcttcactatgtagatttgctcagttgaggggggtctatagcatgttcaaaaagtttttgacatctcataatgattctgaaatgaagtgttagaataaaagcacgacgctctataattagcgcctcaatgtgacaattcattcatgtgtatcccgtacacttgaattcattcctcggctattctacattatggaacaaatattacttgtggccaagatcatttcttacaacgtctgctttgtattatttatcaaataccccagcgaagttctcgctaatgtatcgcaaggcgtccgcacgataagtatcctgaatagtcaacccaacgtttacttcgtcgaataccaatgtgtccctgttcactgactcatacttaggccaattataaacaccttgctttaatcccgcatttggatctaaagtcgtgataaagccagcccacatcgtacccatcaagctcgacatttcgtagtaaccaggcccctttccatggaatgaattcccgtcaaaccccagtccatcaagattctgaaaaataggggcaatctcagcaccatgaggaacgcctacccgagagtcacgctgccaggctggtgtcgcattgaagataaagttaaaacaagtggcagaagttgagaaactctcgcaaaccagccgttgcgctgcgttcatttcgatgtctccaataactgttttcactctttcaaaagtatccttgtcggaaatagagcctatgggaggttctagagtctctgcgacgccactttccgggtaatagcttaaaagtctttcgctgactgagctggggtagccgctatcttctgccagtggccgttggattagagttgaattcaaactgggatataagaattcaagaaactggtcgaaatattgatcgaaaaaaagaaagagacttctgtgatacataccagttaaaaagatggccaagtctttccatgtggatatttgaggcgggatccatgttgcggcttcactggagacaattccactgaggatgggaactggtacatatcgtctctctgttattgctaagctcccatatccttcaacaaagtttccatctagagttggaatggcaaaactggccatcatctggctgttagcctgtgcagagtcattgaaggctgcatctatatcattgagtggaatatgccttaagcattccaaagaattctccacgtctttgcaattggaggccactgagagcctctgatacatttcttccggggtgaacgatgaataagatgtcttcacaattggacctccactttgcataatggctgctcggaacaagccatcatcgcgtccaccgtatgcagtgagatggaggccaacagagtcagcaccggagctgcctccccagattgtcacccgacttttgtctcctccaaaagcttcgatattttcttgaacccagtgcagggctaatctttggtcgtgtaatcccagatttgtgttacgggtacctttgatttggtccccagagatgaacccccatatcgatgaccgatagttgaatgaaactccaataaacgaaagattctcctcggccgcatgtgatatcaagtatgacaaattatacctgccgtcgcctgatcctcccccatggcgccctcccccgtatataaatacaccaacaggcaaaagcccttgcttatagctcgaagggcggacaacgttcaatgtgagacaatcttccgatttcttgaattgttcttggtggtcctacgttgtgaataatgtcagatatgaagaacgcgtgtcggatgtgactcactccgtatccaatgcaatgaggcccatattcaagtgcaggttgaatatgattccacgagacgttgatagaacgaggataatggaatcgcaggtctccgataggtgcctgagcataaggcataccaagaaaaatatcttgatcaaaccgaaagttgtgggttcccgcaaaagtcccattccgggtttttgcaagaggctcatggtggggattttccctatgagtgtcgaagaattcggggacaaaccacaaagccgacgctaggactaccagaaaaagaagagatacagatattgaaatcctttgttgacaaatgtggttttttcgcctttcgggggcctgcatggcgctgcgttccgattctaatggcccgtattcaatcatttcgcatgggtttcgagggtaacagaggaaatatccagtctaccgttgtcaacgagcaagagccaaggatttccaagagtattctagcatgagatgggtgcttattttgtgtctcatgcttgtgacttaatcaagccaagggtaagcaaggcgagaagtggacgccaagcctggcgattacattcgaactgaccaggacccacagtaatcatctttcctatttgggggatatttgacattctttggtgtagtaaatcattcaaaagccacggcacggtcgttggtagctctcactaatgccaccatcgattaaaaatctcccctttttataaaaaatgatcaacatcagaataccaatgctcatgacatcatcgtgggagaggcaaggatcagtgattcgggtttcgtaggtaaccgaaatgtgtcattgaaaatatatctaatgtttgaatgaatagcatgtggctatttctgagtgtatccgttgtgctatcgaacaagtggctagtaaccgatatgaactttagtaaggcaaatccatctagtcccgacttttaatgacaaataattgaccagaatttccagcatatcgtaagattgctttatactatttcatgttttgtgtcaatactaagatcatgatacagcggcattcctagctacctcccatatgctatttggcaccatagcgataagtgtcttgaatggtttgaggccgacgtcttcgcttgttgtcactgatatgacattgcgcaaatacgcatcaatcatcatccccgtggcagtggcattgaacacgagcatcatctgtggcaatgaagccgttgcttatattagcattacaatgattcaaattctcaaggggctttcacctgtcacagtctatatgatgtctttgtttcttggtattacccaattcagcagaatgatcaccactacactgcttcttatctcgcttggaatttttcttgcatcttttcagtctgtccaaacagatctttacggcatctcagcgcaattaattggaattgtctctgactcatcccgacttgtactaatgcaaaaaatattcacctcgcacccattcacatttgacccaccaaccttattctatcacctcgcaccattttgtgcactcttaggggctatcatcacagcctttacctcatttccaactactttggagcttcagaatgtatgggcaatgctactcctaaattgcacccttacctcgatgctgaacctggctggactttttgttgtaagtaagatcatctttcggtacaggatgtggctgatgtttgctcagatacagaagacttcgtctctcaccctcagtctctgcggcatctcgaaagatatctttctcataacagcgaccacactgatttggaaaaccgaaatcaaaactttagagatcataggttacatgatggcaataataggcctggttttataccagaagtgcagtagctagccagcagtcgaagacagctcattacgataggaataaatttgttcatttttttcctgtattttagattattggttttcaacagagttgttccgaaggccctgtgcctaactaacgtaatcggtaaacgagtgggccatgtaaacgagtggcgtgacatgtgaaatgtaaatagacatcggcaaagcccagcatgggcccaagatttcagcnntnnag
